(19) United States
(12) Patent Application Publication
(10) Pub. No.: US 2019/0336615 A1
(43) Pub. Date: Nov. 7, 2019

(54) TUMOR TARGETING CONJUGATES AND METHODS OF USE THEREOF

(71) Applicant: SILVERBACK THERAPEUTICS, INC., Seattle, WA (US)

(72) Inventors: Peter Armstrong Thompson, Seattle, WA (US); Philip Huat Seng Tan, Seattle, WA (US); Peter Robert Baum, Seattle, WA (US); Robert Finley Dubose, Seattle, WA (US); Craig Alan Coburn, Seattle, WA (US); Sean Wesley Smith, Seattle, WA (US)

(21) Appl. No.: 16/476,640

(22) PCT Filed: Jan. 26, 2018
(86) PCT No.: PCT/US18/15607

§ 371 Date: Jul. 9, 2019

Related U.S. Application Data
(60) Provisional application No. 62/451,624, filed on Jan. 27, 2017.
(60) Provisional application No. 62/481,867, filed on Apr. 5, 2017.
(60) Provisional application No. 62/573,626, filed on Oct. 17, 2017.

(51) Int. Cl. A61K 47/68; C07K 16/32; C07K 16/28; A61P 35/00; A61K 9/00; C07K 16/30

(52) U.S. Cl. CPC A61K 47/6879; C07K 16/32; C07K 16/2878; A61P 35/00; A61K 9/0019; A61K 47/6803; A61K 2039/505; C07K 16/3023; C07K 2317/31; C07K 2317/52; C07K 2317/92; C07K 2317/732; C07K 16/3007

(57) ABSTRACT

Various compositions are disclosed. The compositions of conjugates comprising immune-stimulatory compounds are also provided. Additionally provided are the methods of preparation and use of the conjugates. This includes methods for treating disorders, such as cancer.

### PRIORITY

[0001] This application claims the benefit of priority under 35 U.S.C. § 119(e) to U.S. Provisional Application Nos. 62/451,624, filed Jan. 27, 2017; 62/481,867, filed Apr. 5, 2017; and 62/573,626, filed Oct. 17, 2017, each of which are incorporated herein by reference in their entirety.

### SEQUENCE LISTING

[0002] The instant application contains a Sequence Listing which has been submitted electronically in ASCII format and is hereby incorporated by reference in its entirety. Said ASCII copy, created on Jan. 26, 2018, is named 50358-714_601_SL.txt and is 4,346,727 bytes in size.

### BACKGROUND

[0003] One of the leading causes of death in the United States is cancer. The conventional methods of cancer treatment, like chemotherapy, surgery, or radiation therapy, tend to be either highly toxic or nonspecific to a cancer, or both, resulting in limited efficacy and harmful side effects. However, the immune system has the potential to be a powerful, specific tool in fighting cancers. In many cases tumors can specifically express genes whose products are required for inducing or maintaining the malignant state. These proteins may serve as antigen markers for the development and establishment of more specific anti-cancer immune response. The immune response may include the recruitment of immune cells that target tumors expressing these antigen markers. Additionally, the immune cells may express genes whose products are important to proper immune function and may serve as markers for specific types of immune cells. The boosting of this specific immune response has the potential to be a powerful anti-cancer treatment that can be more effective than conventional methods of cancer treatment and can have fewer side effects.

### INCORPORATION BY REFERENCE

[0004] All publications, patents, and patent applications mentioned in this specification are herein incorporated by reference to the same extent as if each individual publication, patent, or patent application was specifically and individually indicated to be incorporated by reference.

### SUMMARY

[0005] In some aspects, a recombinant bispecific antibody, comprises: a) a target antigen binding domain, wherein the target antigen binding domain specifically binds to a tumor associated antigen; b) an effector antigen binding domain, wherein the effector antigen binding domain specifically binds to an antigen on an antigen presenting cell and wherein the antigen is a molecule on the antigen presenting cell; c) an Fc comprising domain; and d) an immune-stimulatory compound attached to the recombinant bispecific antibody by a linker; wherein the recombinant bispecific antibody induces greater immune cell activation when the recombinant bispecific antibody is bound to the tumor associated antigen and to the antigen on the antigen presenting cell as compared to when the recombinant bispecific antibody is bound to the antigen on the antigen presenting cell but not to the tumor associated antigen.

[0006] In some aspects, a recombinant bispecific antibody, comprises: a) a target antigen binding domain, wherein the target antigen binding domain specifically binds to a tumor associated antigen; b) an effector antigen binding domain, wherein the effector antigen binding domain specifically binds to an antigen on an antigen presenting cell and is an antibody antigen binding domain, wherein the antigen is a molecule on the antigen presenting cell; and c) a domain comprising an Fc region; wherein the recombinant bispecific antibody induces greater immune cell activation when the recombinant bispecific antibody is bound to the tumor associated antigen and to the antigen on the antigen presenting cell as compared to when the recombinant bispecific antibody is bound to the antigen on the antigen presenting cell but not to the tumor associated antigen.

[0007] In some aspects, a recombinant bispecific antibody, comprises: a) a target antigen binding domain, wherein the target antigen binding domain specifically binds to a tumor associated antigen; b) an effector antigen binding domain, wherein the effector antigen binding domain specifically binds to an antigen on an antigen presenting cell and is an antibody antigen binding domain, wherein the antigen is a molecule on the antigen presenting cell; and c) a domain comprising an Fc region; wherein the recombinant bispecific antibody induces greater immune cell activation in the presence of cells having cell surface tumor associated antigen and antigen presenting cells having cell surface antigen as compared to immune cell activation in the absence of cells having cell surface tumor associated antigen.

[0008] In some aspects, a recombinant bispecific antibody, comprising: a) a target antigen binding domain, wherein the target antigen binding domain specifically binds to a tumor associated antigen; b) an effector antigen binding domain, wherein the effector antigen binding domain specifically binds to an antigen on an antigen presenting cell and wherein the antigen is a molecule on the antigen presenting cell; and c) an Fc comprising domain; and d) an immune-stimulatory compound attached to the recombinant bispecific antibody by a linker; wherein the recombinant bispecific antibody induces greater immune cell activation in the presence of cells having cell surface tumor associated antigen and antigen presenting cells having cell surface antigen as compared to immune cell activation in the absence of cells having cell surface tumor associated antigen. In some embodiments, the immune cell activation is measured by a cytokine release assay. In some embodiments, the immune cell activation by the recombinant bispecific antibody when the recombinant bispecific antibody is bound to the tumor associated antigen and to the antigen on the antigen presenting cell is at least two times, five times, or ten times greater than immune activation by the recombinant bispecific antibody when the recombinant bispecific antibody is bound to the antigen on the antigen presenting cell but not to the tumor associated antigen as measured by the cytokine release assay. In some embodiments, the immune cell activation by the recombinant bispecific antibody in the presence of cells having cell surface tumor associated antigen and antigen presenting cells having cell surface antigen is at least two times, five times, or ten times greater than immune cell activation by the recombinant bispecific antibody in the absence of the cells having cell surface tumor associated antigen as measured by the cytokine release assay. In some embodiments, the immune cell activation comprises an increase in one or more of: a) a secretion of one or more cytokines as measured by the cytokine release assay, b) a secretion of one or more chemokines as measured by an ELISA immunoassay, c) an expression level of one or more cell surface proteins associated with immune stimulation as measured by FACS, and d) an activity of one or more immune cell functions. In some embodiments, the activity of one or more immune cell functions comprises antibody-dependent cell-mediated cytotoxicity as measured by an ADCC assay, antibody dependent cellular phagocytosis as measured by an ADCP assay, or antigen cross-presentation as measured by a cross-presentation assay. In some embodiments, the recombinant bispecific antibody induces tumor-cell directed antibody-dependent cell-mediated cytotoxicity. In some embodiments, the Fc comprising domain has one or more amino acid substitutions that decrease the binding affinity to one or more Fey receptors as compared to a wild-type Fc comprising domain. In some embodiments, the effector antigen binding domain has an increased binding affinity to the antigen on the antigen presenting cell as compared to the binding affinity of the effector antigen binding domain of an antibody that lacks the target antigen binding domain. In some embodiments, a K_{d} of the binding affinity of the effector antigen binding domain of the recombinant bispecific antibody to the antigen on the antigen presenting cell is increased by two times, five times, ten times, fifty times, or one-hundred times compared to the binding affinity of the effector antigen binding domain of an antibody that lacks the target antigen binding domain. In some embodiments, a K_{d} for binding of the effector antigen binding domain to the antigen on the antigen presenting cell is less than 20 nM, less than 100 nM, or less than 500 nM. In some embodiments, the Fc comprising domain is linked to the target antigen binding domain and to the effector antigen binding domain. In some embodiments, the target antigen binding domain comprises an immunoglobulin heavy chain variable region or antigen binding fragment thereof and an immunoglobulin light chain variable region or antigen binding fragment thereof. In some embodiments, the target antigen binding domain comprises a single chain variable region fragment (scFv). In some embodiments, the tumor associated antigen is an antigen selected from the group consisting of CD5, CD19, CD20, CD25, CD37, CD30, CD33, CD45, CAMPATH-1, HLD-DR, carcinoembryonic antigen (CEA), TAG-72, EpCAM, MUC1, MUC15, folate-binding protein, A33, G250, prostate-specific membrane antigen (PSMA), ferritin, GD2, GD3, GM2, Le^{y}, CA-125, CA19-9, epidermal growth factor, p185HER2, IL-2 receptor, tenascin, a metalloproteinase, endosialin, vascular endothelial growth factor, avB3, WT1, LMP2, HPV E6, HPV E7, EGFRvIII, Her-2/neu, MAGE A3, p53 nonmutant, NY-ESO-1, MelanA/MART1, Ras mutant, gp100, p53 mutant, PR1, bcr-abl, tyrosinase, survivin, PSA, hTERT, a Sarcoma translocation breakpoint fusion protein, EphA2, PAP, ML-IAP, AFP, ERG, NA17, PAX3, ALK, androgen receptor, cyclin B1, polysialic acid, MYCN, RhoC, TRP-2, fucosyl GM1, mesothelin (MSLN), PSCA, MAGE A1, MAGE-A3, sLe(animal), CYP1B1, PLAV1, GM3, BORIS, Tn, GloboH, ETV6-AML, NY-BR-1, RGS5, SART3, STn, Carbonic anhydrase IX, PAX5, OY-TESL Sperm protein 17, LCK, HMWMAA, AKAP-4, SSX2, XAGE 1, B7H3, Legumain, Tie 3, Page4, VEGFR2, MAD-CT-1, PDGFR-B, MAD-CT-2, ROR2, CMET, HERS, EPCAM, CA6, NAPI2B, TROP2, CLDN18.2, fibroblast activation protein (FAP), RON, LY6E, FRA, DLL3, PTK7, LIV1, ROR1, Fos-related antigen 1, VEGFR, endoglin, PD-L1, CD204, CD206, CD301, VTCN1, and VISTA. In some embodiments, the tumor associated antigen is Her2/neu or p185HER2. In some embodiments, the target antigen binding domain comprises the following CDRs: a) HCDR1 comprising an amino acid sequence of SEQ ID NO: 13; b) HCDR2 comprising an amino acid sequence of SEQ ID NO: 14; c) HCDR3 comprising an amino acid sequence of SEQ ID NO: 15; d) LCDR1 comprising an amino acid sequence of SEQ ID NO: 18; e) LCDR2 comprising an amino acid sequence of SEQ ID NO: 19; and f) LCDR3 comprising an amino acid sequence of SEQ ID NO: 20; and wherein the recombinant bispecific antibody specifically binds to Her2/neu or p185HER2. In some embodiments, the target antigen binding domain comprises: a) a VH sequence having at least 80% sequence identity to an amino acid sequence of SEQ ID NO: 12; and b) a VL sequence having at least 80% sequence identity to an amino acid sequence of SEQ ID NO: 17. In some embodiments, the target antigen binding domain comprises: a) a heavy chain sequence having at least 80% sequence identity to an amino acid sequence of SEQ ID NO: 11; and b) a light chain sequence having at least 80% sequence identity to an amino acid sequence of SEQ ID NO: 16. In some embodiments, the target antigen binding domain comprises at least 80% sequence identity to the amino acid sequence between amino acid 20 and amino acid 110 of SEQ ID NO: 12 and at least 80% sequence identity to the amino acid sequence between amino acid 20 and amino acid 105 of SEQ ID NO: 17; and wherein the recombinant bispecific antibody specifically binds to Her2/neu or p185HER2. In some embodiments, the effector antigen binding domain comprises an immunoglobulin heavy chain variable region or antigen binding fragment thereof and an immunoglobulin light chain variable region or antigen binding fragment thereof. In some embodiments, the effector antigen binding domain comprises a single chain variable region fragment (scFv). In some embodiments, the scFv comprises at least 80% sequence identity to an amino acid sequence of SEQ ID NO: 1312. In some embodiments, the antigen presenting cell is a dendritic cell. In some embodiments, the antigen on the antigen presenting cell is a costimulatory molecule. In some embodiments, the antigen on the antigen presenting cell is selected from the group consisting of CD40, OX40L, DEC-205, 4-1BBL, CD36, CD204, MARCO, DC-SIGN, CLEC9A, CLECSA, Dectin 2, CLEC10A, CD206, CD64, CD32A, CD1A, HVEM, CD32B, PD-L1, or BDCA-2. In some embodiments, the effector antigen binding domain is a CD40 agonist. In some embodiments, the effector antigen binding domain comprises the following CDRs: a) HCDR1 comprising an amino acid sequence of SEQ ID NO: 3; b) HCDR2 comprising an amino acid sequence of SEQ ID NO: 4; c) HCDR3 comprising an amino acid sequence of SEQ ID NO: 5; d) LCDR1 comprising an amino acid sequence of SEQ ID NO: 8; e) LCDR2 comprising an amino acid sequence of SEQ ID NO: 9; and f) LCDR3 comprising an amino acid sequence of SEQ ID NO: 10. In some embodiments, the effector antigen binding domain comprises: a) a V_{H} sequence having at least 80% sequence identity to an amino acid sequence of SEQ ID NO: 2; and b) a VL sequence having at least 80% sequence identity to an amino acid sequence of SEQ ID NO: 7. In some embodiments, the effector antigen binding domain comprises: a) a heavy chain sequence having at least 80% sequence identity to an amino acid sequence of SEQ ID NO: 1; and b) a light chain having at least 80% sequence identity to an amino acid sequence of SEQ ID NO: 6. In some embodiments, the antigen on the antigen presenting cell is TREM2 or TNFR2. In some embodiments, the Fc comprising domain is linked C-terminal to the target antigen binding domain and N-terminal to the effector antigen binding domain. In some embodiments, the Fc comprising domain comprises one or more amino acid substitutions that reduce the affinity of the Fc comprising domain to an Fc receptor compared to the affinity of a reference Fc comprising domain to the Fc receptor in the absence of the one or more amino acid substitutions. In some embodiments, reference Fc comprising domain is selected from the group consisting of an Fc comprising domain having the amino acid sequence of SEQ ID NO: 1314, SEQ ID NO: 1315, SEQ ID NO: 1316, and SEQ ID NO: 1317. In some embodiments, reference Fc comprising domain comprises an amino acid sequence selected from the group consisting of SEQ ID NO: 1319, SEQ ID NO: 1320, SEQ ID NO: 1321, and SEQ ID NO: 1322. In some embodiments, the Fc comprising domain comprises a human IgG₁ Fc Region. In some embodiments, the one or more amino acid substitutions comprise L234A, L235A, G237A, and K322A, according to the EU index of Kabat. In some embodiments, the one or more amino acid substitutions comprise E233P, L234V, L235A, AG236, A327G, A330S, and P331S, according to the EU index of Kabat. In some embodiments, the Fc comprising domain comprises a human IgG₂ Fc Region. In some embodiments, the one or more amino acid substitutions comprises K322A, according to the EU index of Kabat. In some embodiments, the Fc comprising domain comprises a human IgG₂ₐ Fc Region. In some embodiments, the one or more amino acid substitutions comprises L235E, E318A, K320A, K322A, according to the EU index of Kabat. In some embodiments, the Fc comprising domain is an Fc null. In some embodiments, the Fc comprising domain has the amino acid sequence of SEQ ID NO: 1313. In some embodiments, the Fc comprising domain comprises the amino acid sequence of SEQ ID NO: 1318. In some embodiments, the Fc comprising domain is linked C-terminal to the target antigen binding domain and has the amino acid sequence of SEQ ID NO: 1311. In some embodiments, the linker links the immune-stimulatory compound to the Fc comprising domain. In some embodiments, the recombinant bispecific antibody further comprises an immune stimulatory compound and a linker, wherein the linker links the immune-stimulatory compound to the Fc comprising domain. In some embodiments, the immune-stimulatory compound is a damage-associated molecular pattern molecule or a pathogen-associated molecular pattern molecule. In some embodiments, the immune-stimulatory compound is a Toll-like receptor agonist, STING agonist, or RIG-I agonist. In some embodiments, the immune-stimulatory compound is a CpG oligonucleotide, Poly G10, Poly G3, Poly I:C, Lipopolysaccharide, zymosan, flagellin, Pam3CSK4, PamCysPamSK4, dsRNA, a diacylated lipopeptide, a triacylated lipoprotein, lipoteichoic acid, a peptidoglycan, a cyclic dinucleotide, a 5′ppp-dsRNA, S-27609, CL307, UC-IV150, imiquimod, gardiquimod, resiquimod, motolimod, VTS-1463GS-9620, GSK2245035, TMX-101, TMX-201, TMX-202, isatoribine, AZD8848, MEDI9197, 3M-051, 3M-852, 3M-052, 3M-854A, S-34240, KU34B, SB9200, SB11285, 8-substituted imidazo[1,5-a]pyridine, or CL663. In some embodiments, the immune-stimulatory compound is an inhibitor of TGFB, Beta-Catenin, PI3K-beta, STAT3, IL-10, IDO, or TDO. In some embodiments, the immune-stimulatory compound is LY2109761, GSK263771, iCRT3, iCRT5, iCRT14, LY2090314, CGX-1321, PRI-724, BC21, ZINCO2092166, LGK974, IWP2, LY3022859, LY364947, SB431542, AZD8186, SD-208, indoximod (NLG8189), F001287, GDC-0919, epacadostat (INCB024360), RG70099, 1-methyl-L-tryptophan, methylthiohydantoin tryptophan, brassinin, annulin B, exiguamine A, PIM, LM10, 8-substituted 2-amino-3H-benzo[b]azepine-4-carboxamide, or INCB023843. In some embodiments, the immune-stimulatory compound does not reduce the affinity of the recombinant bispecific antibody for binding to the tumor associated antigen or to the antigen on the antigen presenting cell. In some embodiments, the recombinant bispecific antibody further comprises a chemotherapeutic compound and a linker, wherein the linker links the chemotherapeutic compound to the Fc comprising domain. In some embodiments, the chemotherapeutic compound comprises an alkylating agent, an anthracycline, a cytoskeletal disruptor, a histone deacetylase inhibitor, an inhibitor of, a kinase inhibitor, a nucleoside analog or precursor analog, a peptide antibiotic, a platinum-based compound, or a plant alkaloid.

[0009] In some aspects, method of making a recombinant bispecific antibody comprises: a) producing an antibody construct comprising: i) a target antigen binding domain, wherein the target antigen binding domain specifically binds to a tumor associated antigen; ii) an effector antigen binding domain, wherein the effector antigen binding domain specifically binds to an antigen on an antigen presenting cell and the antigen is a molecule on the antigen presenting cell, wherein the antigen is a molecule on the antigen presenting cell; iii) an Fc comprising domain; and b) linking an immune-stimulatory compound to the antibody construct, wherein the recombinant bispecific antibody induces greater immune cell activation when the recombinant bispecific antibody is bound to the tumor associated antigen and to the antigen on the antigen presenting cell as compared to when the recombinant bispecific antibody is bound to the antigen on the antigen presenting cell but not to the tumor associated antigen.

[0010] In some aspects, a pharmaceutical composition comprises any recombinant bispecific antibody as described herein and a pharmaceutically acceptable carrier.

[0011] In some aspects, method of treating a subject in need thereof, comprising administering to the subject a therapeutic dose of any recombinant bispecific antibody as described herein or the pharmaceutical composition of any recombinant bispecific antibody as described herein. In some embodiments, the subject has cancer. In some embodiments, the recombinant bispecific antibody or the pharmaceutical composition is administered intravenously, cutaneously, subcutaneously, or injected at a site of affliction. In some embodiments, the recombinant bispecific antibody induces greater immune activation against a cancer as measured by a decrease in cancer cell number or volume as compared to non-cancerous tissue. In some embodiments, the recombinant bispecific antibody is administered intravenously to the subject at a minimum anticipated biological effect level of the recombinant bispecific antibody, a biological effect of the recombinant bispecific antibody is greater when the recombinant bispecific antibody is bound to the tumor associated antigen and to the antigen on the antigen presenting cell as compared to the biological effect of the recombinant bispecific antibody when it is not bound to the tumor associated antigen but is bound to the antigen on the antigen presenting cell; and wherein the biological effect is immune activation as measured by one or more of the group selected from secretion of one or more cytokines, secretion of one or more chemokines, expression level of one or more cell surface proteins associated with immune stimulation, antibody-dependent cell-mediated cytotoxicity, antibody dependent cellular phagocytosis, and antigen cross-presentation. In some embodiments, the recombinant bispecific antibody is administered intravenously to the subject at the minimum anticipated biological effect level of the recombinant bispecific antibody, it induces a greater biological effect at the site of the cancer than at a non-cancerous site and wherein the biological effect is immune activation as measured by one or more of the group selected from secretion of one or more cytokines, secretion of one or more chemokines, expression level of one or more cell surface proteins associated with immune stimulation, antibody-dependent cell-mediated cytotoxicity, antibody dependent cellular phagocytosis, and antigen cross-presentation.

[0012] In some aspects, a conjugate comprises: a) an antibody construct comprising: i) first binding domain, wherein the first binding domain specifically binds to a tumor antigen; ii) a second binding domain, wherein the second binding domain specifically binds to an antigen on an antigen presenting cell, wherein the antigen is a molecule on the antigen presenting cell; and iii) an Fc domain; b) an immune-stimulatory compound; and c) a linker attaching the antibody construct to the immune-stimulatory compound, wherein the linker is covalently bound to the antibody construct and the linker is covalently bound to the immune-stimulatory compound, and wherein a molar ratio of immune-stimulatory compound to antibody construct is less than 8; wherein the first binding domain is attached to the Fc domain and the second binding domain is attached to the Fc domain or to a C-terminal end of a light chain of the first binding domain; wherein a K_{d} for binding of the Fc domain to an Fc receptor in a presence of the first binding domain and the second binding domain is no greater than about 100 times a K_{d} for binding of the Fc domain to the Fc receptor in an absence of the second binding domain; and wherein immune cell activation caused by the conjugate when bound to the tumor antigen as measured by a cytokine release assay is greater than immune cell activation in the absence of binding to the tumor antigen.

[0013] In some aspects, a conjugate comprises: a) an antibody construct comprising: i) first binding domain, wherein the first binding domain specifically binds to a tumor antigen; ii) a second binding domain, wherein the second binding domain specifically binds to an antigen on an antigen presenting cell, wherein the antigen is a molecule on the antigen presenting cell; and iii) an Fc domain; b) an immune-stimulatory compound; and c) a linker attaching the antibody construct to the immune-stimulatory compound, wherein the linker is covalently bound to the antibody construct and the linker is covalently bound to the immune-stimulatory compound, and wherein a molar ratio of immune-stimulatory compound to antibody construct is less than 8; wherein the first binding domain is attached to the Fc domain and the second binding domain is attached to the Fc domain or to a C-terminal end of a light chain of the first binding domain; wherein a K_{d} for binding of the Fc domain to an Fc receptor in a presence of the first binding domain and the second binding domain is no greater than about 100 times a K_{d} for binding of the Fc domain to the Fc receptor in an absence of the second binding domain; and wherein antigen presenting cells are conditionally activated when the conjugate is bound to the tumor antigen as measured by a cytokine release assay.

[0014] In some aspects, an antibody construct comprises: a) a first binding domain, wherein the first binding domain specifically binds to a tumor antigen; b) a second binding domain, wherein the second binding domain specifically binds to an antigen on an antigen presenting cell, wherein the antigen is a molecule on the antigen presenting cell; and c) an Fc domain; wherein the first binding domain is attached to the Fc domain and the second binding domain is attached to the Fc domain or to a C-terminal end of a light chain of the first binding domain, and wherein a K_{d} for binding of the Fc domain to an Fc receptor in a presence of the first binding domain and the second binding domain is no greater than about 100 times a K_{d} for binding of the Fc domain to the Fc receptor in an absence of the second binding domain.

[0015] In some aspects, an antibody construct for use in inducing immune cell activation comprising: a) a first binding domain, wherein the first binding domain specifically binds to a tumor antigen; b) a second binding domain, wherein the second binding domain specifically binds to an antigen on an antigen presenting cell, wherein the antigen is a molecule on the antigen presenting cell; and c) an Fc domain; wherein the first binding domain is attached to the Fc domain and the second binding domain is attached to the Fc domain or to a C-terminal end of a light chain of the first binding domain, and wherein a K_{d} for binding of the Fc domain to an Fc receptor in a presence of the first binding domain and the second binding domain is no greater than about 100 times a K_{d} for binding of the Fc domain to the Fc receptor in an absence of the second binding domain; and wherein immune cell activation caused by the antibody construct upon binding to tumor antigen as measured by a cytokine release assay is greater than immune cell activation caused by the antibody construct in the absence of binding to tumor antigen.

[0016] In some aspects, a conjugate for use in inducing immune cell activation comprising: a) an antibody construct comprising: i) first binding domain, wherein the first binding domain specifically binds to a tumor antigen; ii) a second binding domain, wherein the second binding domain specifically binds to an antigen on an antigen presenting cell, wherein the antigen is a molecule on the antigen presenting cell; and iii) an Fc domain; b) an immune-stimulatory compound; and c) a linker attaching the antibody construct to the immune-stimulatory compound, wherein the linker is covalently bound to the antibody construct and the linker is covalently bound to the immune-stimulatory compound, and wherein a molar ratio of immune-stimulatory compound to antibody construct is less than 8; wherein the first binding domain is attached to the Fc domain and the second binding domain is attached to the Fc domain or to a C-terminal end of a light chain of the first binding domain; wherein a K_{d} for binding of the Fc domain to an Fc receptor in a presence of the first binding domain and the second binding domain is no greater than about 100 times a K_{d} for binding of the Fc domain to the Fc receptor in an absence of the second binding domain; and wherein immune cell activation caused by the conjugate when bound to the tumor antigen as measured by a cytokine release assay is greater than immune cell activation in the absence of binding to the tumor antigen.

[0017] In some aspects, a conjugate for use in conditionally activating an antigen presenting cell comprising: a) an antibody construct comprising: i) first binding domain, wherein the first binding domain specifically binds to a tumor antigen; ii) a second binding domain, wherein the second binding domain specifically binds to an antigen on the antigen presenting cell, and iii) an Fc domain; b) an immune-stimulatory compound; and c) a linker attaching the antibody construct to the immune-stimulatory compound, wherein the linker is covalently bound to the antibody construct and the linker is covalently bound to the immune-stimulatory compound, and wherein a molar ratio of immune-stimulatory compound to antibody construct is less than 8; wherein the first binding domain is attached to the Fc domain and the second binding domain is attached to the Fc domain or to a C-terminal end of a light chain of the first binding domain; wherein a K_{d} for binding of the Fc domain to an Fc receptor in a presence of the first binding domain and the second binding domain is no greater than about 100 times a K_{d} for binding of the Fc domain to the Fc receptor in an absence of the second binding domain; and wherein antigen presenting cells are conditionally activated when the conjugate is bound to the tumor antigen as measured cytokine release assay. In some embodiments, a K_{d} for binding of the first binding domain to the tumor antigen in the presence of the immune-stimulatory compound is no greater than about two times, five times, ten times, or fifty times a K_{d} for binding of the first binding domain to the tumor antigen in an absence of the immune-stimulatory compound In some embodiments, a Kd for binding of the second binding domain to the antigen on the antigen presenting cell in the presence of the immune-stimulatory compound is no greater than about two times, five times, ten times, or fifty times a Kd for binding of the second binding domain to the antigen on the antigen presenting cell in an absence of the immune-stimulatory compound. In some embodiments, a Kd for binding of the first binding domain to the tumor antigen is no greater than about 100 nM. In some embodiments, a Kd for binding of the second binding domain to the antigen on an antigen presenting cell is no greater than about 100 nM. In some embodiments, an amino acid sequence of the tumor antigen has at least 80% sequence identity with the amino acid sequence of a tumor antigen selected from the group consisting of HER2, IL-2 receptor, EGFRvIII (de2-7 EGFR), EGFR, fibroblast activation protein (FAP), tenascin, a metalloproteinase, endosialin, vascular endothelial growth factor, αvβ3, WT1, LMP2, HPV E6, HPV E7, Her-2/neu, p53 nonmutant, NY-ESO-1, GLP-3, MelanA/MART1, Ras mutant, gp100, p53 mutant, PR1, bcr-abl, tyrosinase, survivin, PSA, hTERT, a Sarcoma translocation breakpoint fusion protein, EphA2, PAP, ML-IAP, AFP, ERG, NA17, PAX3, ALK, androgen receptor, cyclin B1, MYCN, RhoC, TRP-2, mesothelin (MSLN), PSCA, MAGE A1, MAGE-A3, CYP1B1, PLAV1, BORIS, ETV6-AML, NY-BR-1, RGS5, SART3, Carbonic anhydrase IX, PAX5, 0Y-TES1, Sperm protein 17, LCK, MAGE C2, MAGE A4, GAGE, TRAIL1, HMWMAA, AKAP-4, SSX2, XAGE 1, B7H3, Legumain, Tie 3, PAGE4, VEGFR2, MAD-CT-1, PDGFR-B, MAD-CT-2, ROR2, CMET, HER3, EPCAM, CA6, NAPI2B, TROP2, Claudin-6 (CLDN6), Claudin-16 (CLDN16), CLDN18.2, RON, LY6E, FRA, DLL3, PTK7, Uroplakin-1B (UPK1B), LIV1, ROR1, STRA6, TMPRSS3, TMPRSS4, TMEM238, Clorf186, Fos-related antigen 1, VEGFR1, endoglin, PD-L1, VTCN1 (B7-H4), VISTA, or a fragment thereof, and a fragment thereof. In some embodiments, an amino acid sequence of the tumor antigen has at least 80% sequence identity with the amino acid sequence of a tumor antigen selected from TABLE 1. In some embodiments, an amino acid sequence of the tumor antigen has at least 80% sequence identity with the amino acid sequence of a tumor antigen selected from the group consisting of HER2, EGFR, CMET, HER3, MUC1, MUC16, EPCAM, MSLN, CA6, NAPI2B, TROP2, CEA, CLDN18.2, EGFRvIII, FAP, EphA2, RON, LY6E, FRA, PSMA, DLL3, PTK7, LIV1, ROR1, MAGE-A3, NY-ESO-1, Endoglin, CD204, CD206, CD301, VTCN1, VISTA, GLP-3, CLDN6, CLDN16, UPK1B, STRA6, TMPRSS3, TMPRSS4, TMEM238, Clorf186, and LRRC15, but not HER2 when the second binding domain specifically binds to CD40. In some embodiments, an amino acid sequence of the antigen on the antigen presenting cell has at least 80% sequence identity with the amino acid sequence of an antigen selected from the group consisting of CD40, DEC-205, CD36 mannose scavenger receptor 1, CLEC9A, DC-SIGN, CLEC12A, BDCA-2, OX40L, 41BBL, CD204, MARCO, CLEC5A, Dectin 1, Dectin 2, CLEC10A, CD206, CD64, CD32A, CD16A, HVEM, PD-L1, CD32B, and CD47, but not CD40 when the first binding domain specifically binds to HER2. In some embodiments, an amino acid sequence of the antigen on the antigen presenting cell has at least 80% sequence identity with the amino acid sequence of an antigen selected from TABLE 2. In some embodiments, the second binding domain is a CD40 agonist. In some embodiments, the first binding domain comprises a single chain variable fragment (scFv). In some embodiments, the second binding domain is a single chain variable fragment (scFv). In some embodiments, the second binding domain comprises a single chain variable fragment from an anti-CD40 antibody, an anti-DEC-205 antibody, an anti-CD36 mannose scavenger receptor 1 antibody, an anti-DC-SIGN antibody, an anti-CLEC9A antibody, an anti-CLEC12A antibody, an anti-BDCA-2 antibody, an anti-OX40L antibody, an anti-41BBL antibody, an anti-CD204 antibody, an anti-MARCO antibody, an anti-CLEC5A antibody, an anti-Dectin 1 antibody, an anti-Dectin 2 antibody, an anti-CLEC10A antibody, an anti-CD206 antibody, an anti-CD64 antibody, an anti-CD32A antibody, an anti-CD16A antibody, an anti-HVEM antibody, an anti-PD-L1, or an anti-CD32B antibody. In some embodiments, the second binding domain is attached to the Fc domain or the light chain of the first binding domain: a) as an Fc domain-second binding domain fusion peptide; b) as a light chain-second binding domain fusion peptide; or c) by a conjugation via a first linker. In some embodiments, the Fc domain is attached to the first binding domain: a) as an Fc domain-first binding domain fusion peptide; or b) by conjugation via a second linker. In some embodiments, the Fc domain is attached to both the first binding domain and to the second binding domain as a first binding domain-Fc domain-second binding domain fusion peptide. In some embodiments, the first binding domain is attached to both the Fc domain and the second binding domain as a first binding domain-second binding domain-Fc domain fusion peptide. In some embodiments, the first binding domain and the Fc domain comprise an antibody and the second binding domain comprises a single chain variable fragment (scFv). In some embodiments, the first binding domain has a set of variable region CDR sequences that comprises a set of variable region CDR sequences set forth in TABLE 3 or TABLE 4. In some embodiments, the second binding domain comprises a variable domain comprising a set of CDR sequences set forth in TABLE 11 or TABLE 12. In some embodiments, the first binding domain comprises a variable region comprising VH and VL sequences at least 80% sequence identity to a pair of VH and VL sequences set forth in TABLE 5 or TABLE 6. In some embodiments, the second binding domain comprises a variable region having VH and VL sequences having at least 80% sequence identity to a VH or VL sequence set forth in TABLE 13 or TABLE 14. In some embodiments, the first binding domain comprises an amino acid sequence having at least 80% sequence identity to any sequence in TABLE 7 or TABLE 8. In some embodiments, the second binding domain comprises an amino acid sequence having at least 80% sequence identity to any sequence in TABLE 15 or TABLE 16. In some embodiments, the second binding domain-Fc domain-first binding domain fusion peptide as described herein comprises an amino acid sequence having at least 80% sequence identity to a sequence in TABLE 9, TABLE 10, or TABLE 17. In some embodiments, the second binding domain-first binding domain-Fc domain fusion peptide as described herein comprises an amino acid sequence having at least 80% sequence identity to a sequence in TABLE 18 or TABLE 19.

[0018] In some aspects, a conjugate comprises: a) an immune-stimulatory compound; b) an antibody construct comprising a first binding domain and an Fc domain, wherein the first binding domain specifically binds to an antigen expressed on a cell, wherein the amino acid sequence of the antigen has at least 80% homology to the amino acid sequence of an antigen selected from a group consisting of Endoglin, CD204, CD206, CD301, VTCN1, VISTA, GLP-3, CLDN6, CLDN16, UPK1B, STRA6, TMPRSS3, TMPRSS4, TMEM238, Clorf186, LRRC15, DEC-205, CD36 mannose scavenger receptor 1, CLEC9A, DC-SIGN, CLEC12A, BDCA-2, 41BBL, MARCO, CLECSA, Dectin 1, Dectin 2, CD64, CD32A, CD16A, HVEM, and CD32B, and a fragment thereof; and c) a linker attaching the antibody construct to the immune-stimulatory compound, wherein the linker is covalently bound to the antibody construct and the linker is covalently bound to the immune-stimulatory compound, and wherein a molar ratio of immune-stimulatory compound to antibody construct is less than 8.

[0019] In some aspects, a conjugate comprises: a) an immune-stimulatory compound; b) an antibody construct comprising a first binding domain and an Fc domain, wherein: i) the first binding domain specifically binds to an antigen, wherein the amino acid sequence of the antigen has at least 80% homology to the amino acid sequence of an antigen selected from a group consisting of endoglin, PD-L1, CD204, CD206, CD301, VTCN1, VISTA, GLP-3, CLDN6, CLDN16, UPK1B, STRA6, TMPRSS3, TMPRSS4, TMEM238, Clorf186, LRRC15, DEC-205, CD36 mannose scavenger receptor 1, CLEC9A, DC-SIGN, CLEC12A, BDCA-2, OX40L, 41BBL, MARCO, CLECSA, Dectin 1, Dectin 2, CD64, CD32A, CD16A, HVEM, CD32B, and CD47, and a fragment thereof, ii) a K_{d} for binding of the first binding domain to the antigen in a presence of the immune-stimulatory compound is less than about 100 nM and no greater than about 100 times a K_{d} for binding of the first binding domain to the antigen in the absence of the immune-stimulatory compound, and iii) a K_{d} for binding of the Fc domain to an Fc receptor in the presence of the immune-stimulatory compound is no greater than about 100 times a K_{d} for binding of the Fc domain to the Fc receptor in the absence of the immune-stimulatory compound; and c) a linker attaching the antibody construct to the immune-stimulatory compound, wherein the linker is covalently bound to the antibody construct and the linker is covalently bound to the immune-stimulatory compound, and wherein a molar ratio of immune-stimulatory compound to antibody construct is less than 8.

[0020] In some aspects, a conjugate comprises: a) an immune-stimulatory compound; b) an antibody construct comprising a first binding domain and an Fc domain, wherein: i) the first binding domain comprises a variable region comprising a set of CDR sequences that comprises at least 80% sequence identity to a set of variable region CDR sequences set forth in TABLE 3 or TABLE 11; ii) a K_{d} for binding of the first binding domain to the antigen in a presence of the immune-stimulatory compound is less than about 100 nM and no greater than about 100 times a K_{d} for binding of the first binding domain to the antigen in the absence of the immune-stimulatory compound, and iii) a K_{d} for binding of the Fc domain to an Fc receptor in the presence of the immune-stimulatory compound is no greater than about 100 times a K_{d} for binding of the Fc domain to the Fc receptor in the absence of the immune stimulatory compound; and c) a linker attaching the antibody construct to the immune-stimulatory compound, wherein the linker is covalently bound to the antibody construct and the linker is covalently bound to the immune-stimulatory compound, and wherein a molar ratio of immune-stimulatory compound to antibody construct is less than 8.

[0021] In some aspects, a conjugate for use in activating an immune cell comprises: a) an immune-stimulatory compound; b) an antibody construct comprising a first binding domain and an Fc domain, wherein the first binding domain specifically binds to an antigen expressed on a cell, wherein the amino acid sequence of the antigen has at least 80% homology to the amino acid sequence of an antigen selected from a group consisting of Endoglin, CD204, CD206, CD301, VTCN1, VISTA, GLP-3, CLDN6, CLDN16, UPK1B, STRA6, TMPRSS3, TMPRSS4, TMEM238, Clorf186, LRRC15, DEC-205, CD36 mannose scavenger receptor 1, CLEC9A, DC-SIGN, CLEC12A, BDCA-2, 41BBL, MARCO, CLEC5A, Dectin 1, Dectin 2, CD64, CD32A, CD16A, HVEM, and CD32B, and a fragment thereof; and c) a linker attaching the antibody construct to the immune-stimulatory compound, wherein the linker is covalently bound to the antibody construct and the linker is covalently bound to the immune-stimulatory compound, and wherein a molar ratio of immune-stimulatory compound to antibody construct is less than 8; and wherein immune cell activation caused by the conjugate when bound to the tumor antigen as measured by a cytokine release assay is greater than immune cell activation is greater than immune cell activation in the absence of binding to the tumor antigen.

[0022] In some aspects, a conjugate for use in activating an immune cell comprises: a) an immune-stimulatory compound; b) an antibody construct comprising a first binding domain and an Fc domain, wherein: i) the first binding domain specifically binds to an antigen, wherein the amino acid sequence of the antigen has at least 80% homology to the amino acid sequence of an antigen selected from a group consisting of endoglin, PD-L1, CD204, CD206, CD301, VTCN1, VISTA, GLP-3, CLDN6, CLDN16, UPK1B, STRA6, TMPRSS3, TMPRSS4, TMEM238, Clorf186, LRRC15, DEC-205, CD36 mannose scavenger receptor 1, CLEC9A, DC-SIGN, CLEC12A, BDCA-2, OX40L, 41BBL, MARCO, CLEC5A, Dectin 1, Dectin 2, CD64, CD32A, CD16A, HVEM, CD32B, and CD47, and a fragment thereof, ii) a K_{d} for binding of the first binding domain to the antigen in a presence of the immune-stimulatory compound is less than about 100 nM and no greater than about 100 times a K_{d} for binding of the first binding domain to the antigen in the absence of the immune-stimulatory compound, and iii) a K_{d} for binding of the Fc domain to an Fc receptor in the presence of the immune-stimulatory compound is no greater than about 100 times a K_{d} for binding of the Fc domain to the Fc receptor in the absence of the immune-stimulatory compound; and c) a linker attaching the antibody construct to the immune-stimulatory compound, wherein the linker is covalently bound to the antibody construct and the linker is covalently bound to the immune-stimulatory compound, and wherein a molar ratio of immune-stimulatory compound to antibody construct is less than 8; and wherein immune cell activation caused by the conjugate when bound to the tumor antigen as measured by a cytokine release assay is greater than immune cell activation is greater than immune cell activation in the absence of binding to the tumor antigen.

[0023] In some aspects, a conjugate for use in activating an immune cell comprises: a) an immune-stimulatory compound; b) an antibody construct comprising a first binding domain and an Fc domain, wherein the first binding domain comprises a variable region comprising a set of CDR sequences that comprises at least 80% sequence identity to a set of variable region CDR sequences set forth in TABLE 3 or TABLE 11; c) a linker attaching the antibody construct to the immune-stimulatory compound, wherein the linker is covalently bound to the antibody construct and the linker is covalently bound to the immune-stimulatory compound, and wherein a molar ratio of immune-stimulatory compound to antibody construct is less than 8; and wherein immune cell activation caused by the conjugate when bound to the tumor antigen as measured by a cytokine release assay is greater than immune cell activation is greater than immune cell activation in the absence of binding to the tumor antigen.

[0024] In some aspects, a conjugate for use in activating an immune cell comprising: a) an immune-stimulatory compound; b) an antibody construct comprising a first binding domain and an Fc domain, wherein: i) the first binding domain comprises a variable region comprising a set of CDR sequences that comprises at least 80% sequence identity to a set of variable region CDR sequences set forth in TABLE 3 or TABLE 11; ii) a K_{d} for binding of the first binding domain to the antigen in a presence of the immune-stimulatory compound is less than about 100 nM and no greater than about 100 times a K_{d} for binding of the first binding domain to the antigen in the absence of the immune-stimulatory compound, and iii) a K_{d} for binding of the Fc domain to an Fc receptor in the presence of the immune-stimulatory compound is no greater than about 100 times a K_{d} for binding of the Fc domain to the Fc receptor in the absence of the immune stimulatory compound; and c) a linker attaching the antibody construct to the immune-stimulatory compound, wherein the linker is covalently bound to the antibody construct and the linker is covalently bound to the immune-stimulatory compound, and wherein a molar ratio of immune-stimulatory compound to antibody construct is less than 8; and wherein immune cell activation caused by the conjugate when bound to the tumor antigen as measured by a cytokine release assay is greater than immune cell activation is greater than immune cell activation in the absence of binding to the tumor antigen. In some embodiments, the first binding domain comprises a variable region comprising V_{H} and V_{L} sequences at least 80% sequence identity to a pair of V_{H} and V_{L} sequences set forth in TABLE 5 or TABLE 13. In some embodiments, the first binding domain comprises an amino acid sequence having at least 80% sequence identity to any sequence in TABLE 7 or TABLE 15. In some embodiments, a Kd for binding of the Fc domain to the Fc receptor in the presence of the immune-stimulatory compound is no greater than about two times, five times, ten times, or fifty times a Kd for binding of the Fc domain to the Fc receptor in an absence of the immune-stimulatory compound. In some embodiments, the immune-stimulatory compound is a damage-associated molecular pattern molecule or pathogen-associated molecular pattern molecule. In some embodiments, the immune-stimulatory compound is a toll-like receptor agonist, STING agonist, or RIG-I agonist. In some embodiments, the immune-stimulatory compound is a CpG oligonucleotide, Poly G10, Poly G3, Poly I:C, Lipopolysaccharide, zymosan, flagellin, Pam3CSK4, PamCysPamSK4, dsRNA, a diacylated lipopeptide, a triacylated lipoprotein, lipoteichoic acid, a peptidoglycan, a cyclic dinucleotide, a 5′ppp-dsRNA, S-27609, CL307, UC-IV150, imiquimod, gardiquimod, resiquimod, motolimod, VTS-1463GS-9620, GSK2245035, TMX-101, TMX-201, TMX-202, isatoribine, AZD8848, MEDI9197, 3M-051, 3M-852, 3M-052, 3M-854A, S-34240, KU34B, SB9200, SB11285, 8-substituted imidazo[1,5-a]pyridine, or CL663. In some embodiments, the immune-stimulatory compound is an inhibitor of TGFB, Beta-Catenin, TNIK, Tankyrase, PI3K-beta, STAT3, IL-10, IDO, or TDO. In some embodiments, the immune-stimulatory compound is LY2109761, GSK263771, iCRT3, iCRT5, iCRT14, LY2090314, CGX-1321, PRI-724, BC21, ZINCO2092166, LGK974, IWP2, LY3022859, LY364947, SB431542, AZD8186, SD-208, indoximod (NLG8189), F001287, GDC-0919, epacadostat (INCB024360), RG70099, 1-methyl-L-tryptophan, methylthiohydantoin tryptophan, brassinin, annulin B, exiguamine A, PIM, LM10, 8-substituted 2-amino-3H-benzo[b]azepine-4-carboxamide, or INCB023843. In some embodiments, the Fc domain is an Fc domain variant comprising at least one amino acid residue change as compared to a wild type sequence of the Fc domain. In some embodiments, the Fc domain variant binds to an Fc receptor with altered affinity as compared to the wild type Fc domain. In some embodiments, the at least one amino acid residue change is selected from a group consisting of: a) F243L, R292P, Y300L, L235V, and P396L, wherein numbering of amino acid residues in the Fc domain is according to the EU index; b) S239D and I332E, wherein numbering of amino acid residues in the Fc domain is according to the EU index; and c) S298A, E333A, and K334A, wherein numbering of amino acid residues in the Fc domain is according to the EU index. In some embodiments, the antibody construct or conjugate induces secretion of cytokines by an immune cell as measured by a cytokine release assay. In some embodiments, the cytokine is IFN-γ, IL-8, IL-12, IL-2, or a combination thereof. In some embodiments, the antibody construct or conjugate induces antigen presentation on a dendritic cell, B cell, macrophage, or a combination thereof.

[0025] In some aspects, a method of making a conjugate comprises linking an antibody construct as described herein to an immune stimulatory compound by a linker.

[0026] In some aspects, a pharmaceutical composition comprises the conjugate or antibody construct of as described herein and a pharmaceutically acceptable carrier.

[0027] In some aspects, a method of treatment for a subject in need thereof comprises administering a therapeutic dose of the antibody construct or conjugate as described herein or the pharmaceutical composition as described herein. In some embodiments, the subject has cancer. In some embodiments, the antibody construct or conjugate is administered intravenously, cutaneously, subcutaneously, or injected at a site of affliction. In some embodiments, after administration of antibody construct or conjugate to the subject, immune cell activation is increased in the subject as measured by a secretion of one or more cytokines as measured by a cytokine release assay, a secretion of one or more chemokines as measured by an ELISA immunoassay, an expression level of one or more cell surface proteins associated with immune stimulation as measured by an ELISA immunoassay, an activity of one or more immune cell functions, or combination thereof, as compared to before administration of the antibody construct or conjugate to the subject. In some embodiments, the activity of one or more immune cell functions comprises antibody-dependent cell-mediated cytotoxicity as measured by an ADCC assay, antibody dependent cellular phagocytosis as measured by an ADCP assay, or antigen cross-presentation as measured by a cross-presentation assay. In some embodiments, after administration of the antibody construct or conjugate to the subject, tumor cell intracellular signaling is altered in the subject as compared to tumor cell intracellular signaling before administration of the antibody construct or conjugate as measured by an intracellular signaling assay. In some embodiments, the altered tumor cell intracellular signaling increases tumor immunogenicity as measured by an immunogencity assay.

[0028] In some aspects, a kit comprising a pharmaceutically acceptable dosage unit of a pharmaceutically effective amount of the conjugate or antibody construct as described herein or the pharmaceutical composition as described herein.

[0029] Described herein are recombinant bispecific antibodies useful in the treatment of cancer. The recombinant antibodies according to the current disclosure are bispecific antibodies that can comprise at least two different antigen binding domains that are coupled to an Fc comprising domain. This recombinant antibody can exhibit more potent immune activation when both antigen binding domains are bound to their respective antigen. One example method for increasing immune activation when both antigen binding domains are bound to their respective antigen can be accomplished by a recombinant antibody coupled to an Fc comprising domain that exhibits reduced affinity to an Fc receptor. Another example method for achieving an increased immune activation when both antigen binding domains are bound to their respective antigen can be accomplished by using a binding domain with a low avidity for its antigen as one of the antigen binding domains in the recombinant antibody. One binding domain of the bispecific antibody can specifically bind to a tumor associated antigen and another binding domain can specifically bind to a molecule on the surface of an antigen presenting cell (APC), such as a macrophage or dendritic cell. Thus, the two binding domains cooperate to bring APCs to cancerous cells or tumors allowing the APC to initiate/propagate a cancer cell/tumor specific immune response through cytokine release, chemokine release, or presentation of tumor associated antigens to effector or helper T cells.

[0030] Therapy with recombinant monoclonal or bispecific antibodies can generally be well tolerated, however, antibodies directed to immune response stimulating receptors on immune cells can result in systemic toxic release of cytokines and other immune modulators that can limit their clinical use or dose, thereby limiting their effectiveness in generating patient anti-tumor responses. This immune activation can be especially non-beneficial when it occurs systemically in the absence of tumor antigens. The systemic agonism exhibited by antibodies to many APC receptors can depend upon high affinity binding to the APC antigen and higher order cross-linking of the APC receptors by clustering of the cell bound antibodies. Many studies show this can be mediated by Fc gamma Receptor (FcγR) binding to the Fc domain of the antibodies, and cross-linking of different antibody molecules and their bound APC immune stimulating receptors. An additional complication of cross-linking by FcγR can be antibody dependent cell mediated cytotoxicity (ADCC) of the APCs resulting in lowered immune response to tumors and pathogens. ADCC can be attributed to the antibody Fc region which binds to FcγRs on effector cells (e.g., NK cells). Two non-mutually exclusive solutions to the above can be contemplated. In one, elevating the threshold for FcγR binding can reduce excessive systemic immune activation and unwanted ADCC directed to APCs of antibody therapy. In the second, the affinity of the antibody for its APC target can be lowered so that effective agonistic binding of antibody molecules to APCs can be driven by avidity, preferentially found when the bispecific antibody is bound to its tumor antigen target. As described herein, the Fc comprising region of the recombinant bispecific antibody can contain one or more mutations that can reduce binding to an FcγR. Alternatively, the Fc region can be derived from an IgG subclass that can bind FcγRs with low affinity, for example IgG₂. Fc receptors can be highly expressed on different antigen presenting cells such as dendritic cells, and their engagement can lead to activation of the immunostimulatory and antigen presenting function of these cells. By reducing binding of the Fc region to the FcγR the threshold for APC activation can be raised. By raising the threshold for APC activation, the possibility of a damaging immune/inflammatory response to healthy, non-cancerous tissue can be reduced. Attenuating activation by modifications made to the Fc regions can result in superior bioavailability and lower side effects. Also described herein are bispecific antibodies with high affinity anti-tumor antigen binding and low affinity immune receptor binding such that APC activation can be increased when the bispecific antibody is bound to its tumor antigen. As a result, the antibodies of this disclosure generally can have a higher maximum tolerated dosage, and can be administered at levels higher than therapeutic antibodies not modified as described herein.

[0031] In some embodiments, the recombinant bispecific antibody further comprises a chemotherapeutic compound and a linker, wherein the linker links the chemotherapeutic compound to the Fc comprising domain. In some aspects, the chemotherapeutic compound comprises an alkylating agent, an anthracycline, a cytoskeletal disruptor, a histone deacetylase inhibitor, an inhibitor of, a kinase inhibitor, a nucleoside analog or precursor analog, a peptide antibiotic, a platinum-based compound, or a plant alkaloid.

[0032] In some aspects, the recombinant bispecific antibody specifically binds to the tumor associated antigen in a cluster of recombinant antibodies and induces a signal in the antigen presenting cell. In some aspects, the recombinant antibody specifically binds to the tumor associated antigen in a cluster of recombinant antibodies and results in an increased avidity for the molecule on the antigen presenting cell. In some aspects, a recombinant antibody density resulting from the recombinant antibody binding to the tumor associated antigen induces signaling in the antigen presenting cell. In some aspects, the recombinant antibody density of greater than 5000 antibodies per cell resulting from the recombinant antibody specifically binding to the tumor associated antigen induces signaling in the antigen presenting cell.

### BRIEF DESCRIPTION OF THE DRAWINGS

[0033] The novel features of the disclosure are set forth with particularity in the appended claims. A better understanding of the features and advantages of the present disclosure will be obtained by reference to the following detailed description that sets forth illustrative aspects, in which the principles of the disclosure are utilized, and the accompanying drawings of which:

[0034] FIG. 1 illustrates a schematic of an antibody construct comprising an antibody and a second binding domain. An antibody can comprise two heavy chains as shown in gray and two light chains as shown in light gray. A portion of the heavy chains can comprise Fc domains (705 and 720). An antibody can comprise a binding domain comprising two antigen binding sites (710 and 715). The second binding domain can be attached to the antibody (780 and 785), for example, at the C-terminus of the heavy chains.

[0035] FIG. 2 illustrates a schematic of an exemplary conjugate. A conjugate can comprise an antibody, which can comprise two heavy chains as shown in gray and two light chains as shown in light gray. The antibody can comprise a binding domain comprising two antigen binding sites (910 and 915), and a portion of the heavy chains contain Fc domains (905 and 920). The immune-stimulatory compounds (930 and 940) can be conjugated to the antibody by linkers (960 and 970). A second binding domain can be attached to the antibody (980 and 985), for example, at the C-terminus of the heavy chains.

[0036] FIG. 3 illustrates a schematic of an exemplary conjugate. A conjugate can comprise the Fc region of an antibody with the heavy chains shown in gray, and two scaffolds as shown in light gray. The conjugate can comprise a first binding domain comprising two antigen binding sites (1110 and 1115) in the scaffolds, and a portion of the heavy chains can comprise Fc domains (1105 and 1120). The immune-stimulatory compounds (1130 and 1140) can be conjugated to the scaffolds by linkers (1160 and 1170). A second binding domain can be attached to the conjugate (1180 and 1185), for example, at the C-terminus of the heavy chains.

[0037] FIG. 4 illustrates a schematic of an exemplary conjugate. A conjugate can comprise the F(ab′)2 region of an antibody with heavy chains shown in gray and light chains shown in light gray, and two scaffolds as shown in dark gray. The conjugate can comprise a first binding domain comprising two antigen binding sites (1310 and 1315), and a portion of two scaffolds contain Fc domains (1340 and 1345). The immune-stimulatory compounds (1330 and 1340) can be conjugated to the scaffold by linkers (1360 and 1370). A second binding domain can be attached to the conjugate (1380 and 1385).

[0038] FIG. 5 illustrates a schematic of an exemplary conjugate. A conjugate can comprise two scaffolds as shown in light gray and two scaffolds as shown in dark gray. The conjugate can comprise a first binding domain comprising two antigen binding sites (1510 and 1515), and a portion of the two dark gray scaffolds contain Fc domains (1540 and 1545). The immune-stimulatory compounds (1530 and 1535) can be conjugated to the scaffolds by linkers (1560 and 1570). A second binding domain can be attached to the conjugate (1580 and 1585).

[0039] FIG. 6 illustrates a CLUSTAL O(1.2.1) multiple amino acid sequence alignment of the amino acid sequences of SBT-040-G1VLPLL (SEQ ID NO: 1323), SBT-040-G1AAA (SEQ ID NO: 1324), SBT-040-G1WT (SEQ ID NO: 1325), and SBT-040-G1DE (SEQ ID NO: 1326). The SBT-040-G1VLPLL sequence is an amino acid sequence of an IgG1 isotype heavy chain of a human CD40 monoclonal antibody SBT-040 containing L235V, F243L, R292P, Y300L, and P396L amino acid residue modifications of a wild type IgG1 Fc domain. The L235V, F243L, R292P, Y300L, and P396L amino acid residue modifications are in bold. The SBT-040-G1AAA sequence is an amino acid sequence of an IgG1 isotype heavy chain of a human CD40 monoclonal antibody SBT-040 containing S298A, E333A, and K334A amino acid residue modifications of a wild type IgG1 Fc domain. The S298A, E333A, and K334A amino acid residue modifications are italics. The SBT-040-G1WT sequence is an amino acid sequence of an IgG1 isotype heavy chain of a human CD40 monoclonal antibody SBT-040. The SBT-040-G1AAA sequence is an amino acid sequence of an IgG1 isotype heavy chain of a human CD40 monoclonal antibody SBT-040 containing S239D and I332E amino acid residue modifications bold italics. Additionally, the hinge region of each amino acid sequence is differentiated from other regions of the amino acid sequence by brackets. The left bracket indicates the upper portion of the hinge region (UH). The four residues between the brackets are the middle portion of the hinge region. The right bracket indicates the lower portion of the hinge region (LH). SEQ ID NO: 1327 is the sequence of SBT-040-G1VLPLL without the leader sequence. SEQ ID NO: 1328 is the sequence of SBT-040-G1AAA without the leader sequence. SEQ ID NO: 577 is the sequence of SBT-040-G1WT without the leader sequence. SEQ ID NO: 1329 is the sequence of SBT-040-G1DE without the leader sequence.

[0040] FIGS. 7A and 7B illustrate that a bispecific anti-HER2×anti-CD40 IgG1 conjugate (HER2-CD40G1) and a bispecific anti-HER2×anti-CD40 IgG1 Fc null antibody (HER2-CD40 G1null) had decreased binding to CD40 on monocyte-derived dendritic cells (moDCs) compared to the parental anti-CD40 monoclonal antibody (SBT-040G1). moDCs were stained with either SBT-040G1, HER2-CD40G1 and HER2-CD40 G1ₙᵤₗₗ at equivalent molar concentrations. A secondary goat anti-human IgG polyclonal antibody was used to detect SBT-040G1, HER2-CD40G1 or HER2-CD40ₙᵤₗₗ binding by flow cytometry. MFI fold change was calculated as (MFI test Ab/MFI isotype control).

[0041] FIG. 8A illustrates activation of dendritic cells (DCs) was dependent on CD40 agonism and Fc receptor agonism by bispecific anti-HER2-anti-CD40 IgG1 antibody construct (HER2-CD40G1) bound to the tumor antigen HER2 as shown by increased expression of CD86. This figure also illustrates the anti-HER2×anti-CD40 IgG1 Fc null antibody (HER2-CD40 G1ₙᵤₗₗ) conditional activation of dendritic cells (DCs) when bound to the tumor antigen HER2. CD86 was measured by flow cytometry on DCs co-cultured with CHO cells with or without HER2 expression in the presence of the HER2-CD40G1 antibody construct, anti-HER2-anti-CD40 IgG1 Fc null (HER2-CD40G1ₙᵤₗₗ), or the parental anti-CD40 monoclonal antibody (SBT-040G1) at the indicated concentrations. Each data point was generated from pooled duplicate samples. HER2⁺ CHO indicates co-culture with HER2 expressing CHO cells; HERT CHO indicates a co-culture with CHO cells that were not expressing HER2.

[0042] FIG. 8B illustrates activation of dendritic cells (DCs) was dependent on CD40 agonism and Fc receptor agonism by bispecific anti-HER2-anti-CD40 IgG1 antibody construct (HER2-CD40G1) bound to the tumor antigen HER2 as shown by increased expression of CD83. This figure also illustrates anti-HER2×anti-CD40 IgG1 Fcₙᵤₗₗ (HER2-CD40G1ₙᵤₗₗ) antibody conditional activation of dendritic cells (DCs) when bound to the tumor antigen HER2. CD83 was measured by flow cytometry on DCs co-cultured with CHO cells with or without HER2 expression in the presence of the HER2-CD40G1 antibody construct, anti-HER2×anti-CD40 IgG1 Fcₙᵤₗₗ (HER2-CD40G1ₙᵤₗₗ), or the parental anti-CD40 monoclonal antibody (SBT-040G1) at the indicated concentrations. Each data point was generated from pooled duplicate samples. HER2⁺ CHO indicates co-culture with HER2 expressing CHO cells; HERT CHO indicates a co-culture with CHO cells that were not expressing HER2.

[0043] FIG. 9 illustrates macrophage-mediated antibody-dependent cellular cytotoxicity (ADCC) of HER2⁺ target cells was efficiently induced by bispecific anti-HER2×anti-CD40 IgG1 antibody construct (HER2-CD40G1). Monocyte-derived macrophages were generated by culturing monocytes for 7 days in the presence of GM-CSF. Macrophages were plated with HER2-expressing CHO cells at a 2:1 ratio in the presence of titrating concentrations of HER2-CD40G1 antibody construct, anti-HER2-anti-CD40 IgG1 Fc null antibody construct (HER2-CD40G1ₙᵤₗₗ), parental anti-CD40 monoclonal antibody (SBT-040G1), or parental anti-HER2 monoclonal antibody (SBT-050G1). After 24 hours, CHO viability was assessed by flow cytometry as a readout of ADCC activity.

[0044] FIG. 10 illustrates schematics for three separate non-limiting embodiments of recombinant bispecific antibodies.

[0045] FIG. 11 illustrates a schematic of an antibody construct comprising an antibody and a second binding domain. An antibody can comprise two heavy chains as shown in gray and two light chains as shown in light gray. A portion of the heavy chains can comprise Fc domains (1705 and 1720). An antibody can comprise a binding domain comprising two antigen binding sites (1710 and 1715). The second binding domain can be attached to the antibody (1780 and 1785), for example, at the C-terminus of the light chains.

[0046] FIG. 12 illustrates a schematic of an exemplary conjugate. A conjugate can comprise an antibody, which contains two heavy chains as shown in gray and two light chains as shown in light gray. The antibody can comprise a binding domain comprising two antigen binding sites (1910 and 1915), and a portion of the heavy chains can comprise Fc domains (1905 and 1920). The immune-stimulatory compounds (1930 and 1940) can be conjugated to the antibody by linkers (1960 and 1970). A second binding domain can be attached to the antibody (1980 and 1985), for example, at the C-terminus of the light chains.

[0047] FIG. 13 illustrates a schematic of an exemplary conjugate. A conjugate can comprise the Fc region of an antibody shown in gray, and two scaffolds as shown in light gray. The conjugate can comprise a first binding domain comprising two antigen binding sites (2110 and 2115) in the scaffolds, and a portion containing Fc domains (2105 and 2120). The immune-stimulatory compounds (2130 and 2140) can be conjugated to the scaffolds by linkers (2160 and 2170). A second binding domain can be attached to the conjugate (2180 and 2185).

[0048] FIG. 14 illustrates a schematic of an exemplary conjugate. A conjugate can comprise the F(ab′)2 region of an antibody with heavy chains shown in gray and light chains shown in light gray, and two scaffolds as shown in dark gray. The conjugate can comprise a first binding domain comprising two antigen binding sites (2310 and 2315), and a portion of two scaffolds can comprise Fc domains (2340 and 2345). The immune-stimulatory compounds (2330 and 2340) can be attached to the scaffolds by linkers (2360 and 2370). A second binding domain can be attached to the conjugate (2380 and 2385), for example, at the C-terminus of the light chains.

[0049] FIG. 15 illustrates a schematic of an exemplary conjugate. A conjugate can comprise two scaffolds as shown in light gray and two scaffolds as shown in dark gray. The conjugate can comprise a first binding domain comprising two antigen binding sites (2510 and 2515), and a portion of the two dark gray scaffolds contain Fc domains (2540 and 2545). The immune-stimulatory compounds (2530 and 2540) can be attached to the scaffolds by linkers (2560 and 2570). A second binding domain can be attached to the conjugate (2580 and 2585).

[0050] FIG. 16 illustrates a schematic of an antibody construct comprising an antibody. An antibody can comprise two heavy chains and two light chains. A portion of the heavy chains can comprise Fc domains (2705 and 2720). An antibody can comprise a binding domain comprising two antigen binding sites shown in black (2710 and 2715).

[0051] FIG. 17 illustrates a schematic of an antibody construct comprising an antibody. An antibody can comprise two heavy chains and two light chains. A portion of the heavy chains can comprise Fc domains (2925 and 2930). An antibody can comprise a first binding domain comprising two antigen binding sites shown in black (2910 and 2915). An antibody can comprise a second binding domain comprising two single chain variable fragments (2905 and 2920) attached to a C-terminus of the light chains. A single chain variable fragment can be attached to a light chain chain at a heavy chain variable domain of the single chain variable fragment. A single chain variable fragment can be attached to a light chain at a light chain variable domain of the single chain variable fragment.

[0052] FIG. 18 illustrates a schematic of an antibody construct comprising an antibody. An antibody can comprise two heavy chains and two light chains. A portion of the heavy chains can comprise Fc domains (3120 and 3125). An antibody can comprise a first binding domain comprising two antigen binding sites shown in black (3110 and 3115). An antibody can comprise a second binding domain comprising two single chain variable fragments (3130 and 3135) attached to a C-terminus of the heavy chains. A single chain variable fragment can be attached to a heavy chain chain at a heavy chain variable domain of the single chain variable fragment. A single chain variable fragment can be attached to a heavy chain at a light chain variable domain of the single chain variable fragment.

[0053] FIG. 19 illustrates a schematic of an antibody construct comprising an antibody. An antibody can comprise two heavy chains and two light chains. A portion of the heavy chains can comprise Fc domains (3330 and 3335). An antibody can comprise a first binding domain comprising two antigen binding sites shown in black (3310 and 3315). An antibody can comprise a second binding domain comprising two single chain variable fragments (3320 and 3325) attached to a C-terminus of the light chains. A single chain variable fragment can be attached to a light chain chain at a heavy chain variable domain of the single chain variable fragment. A single chain variable fragment can be attached to a light chain at a light chain variable domain of the single chain variable fragment. An antibody can comprise a third binding domain comprising two single chain variable fragments (3340 and 3345) attached to a C-terminus of the heavy chains. A single chain variable fragment can be attached to a heavy chain chain at a heavy chain variable domain of the single chain variable fragment. A single chain variable fragment can be attached to a heavy chain at a light chain variable domain of the single chain variable fragment.

[0054] FIG. 20 shows that HER2-TLR8 agonist conjugates and HER2×CD40 TLR8 agonist conjugates were active in the presence of PBMCs and SKBR3 cells that express HER2, as measured by TNFα production. HER2 antibody is HER2-G1WT.

[0055] FIG. 21 shows that TROP2(TROP2-G1WT)-TLR8 agonist conjugates were active in the presence of PBMCs and SKBR3 cells that express HER2, as measured by TNFα production. TROP2 antibody is TROP2-G1WT.

[0056] FIG. 22 shows that a CEA-TLR8 agonist conjugate was active in the presence of monocytes and CHO cells engineered to express CEA, while the CEA antibody alone, and the control antibodies (HER2-G1WT) and conjugates were not active, as measured by TNFα production. CEA antibody is CEA-G1WT.

[0057] FIG. 23 shows that an anti-CEA-TLR8 agonist conjugate and a CEA×CD40 TLR8 agonist conjugate were active in the presence of monocytes and SKCO-1 cells, as measured by TNFα production. CEA antibody is CEA-G1WT and bispecific CEA×CD40 antibody is CEA×CD40-G1WT.

[0058] FIG. 24 shows that a TROP TRL8 agonist conjugate was active in a dose-dependent manner on various cell lines expressing TROP2.

[0059] FIG. 25 shows that a TROP2 TLR8 agonist conjugate was active in a dose-dependent manner on various cell lines expressing TROP2.

[0060] FIG. 26 shows that a HER2×CD40 bispecific antibody conjugate was able to activate monocyte-derived dendritic cells.

[0061] FIG. 27 shows that a HER2×CD40 bispecific antibody conjugate was further able to stimulate T cells in the presence of HER2 positive tumor cells.

[0062] FIGS. 28A, 28B, and 28C show that activation of primary B cells (CD86 expression) was increased by bispecific HER2×CD40 recombinant antibody conjugate as compared to a Her2 recombinant antibody conjugate.

### DETAILED DESCRIPTION

[0063] Additional aspects and advantages of the present disclosure will become apparent to those skilled in this art from the following detailed description, wherein illustrative aspects of the present disclosure are shown and described. As will be realized, the present disclosure is capable of other and different aspects, and its several details are capable of modifications in various respects, all without departing from the disclosure. Accordingly, the drawings and description are to be regarded as illustrative in nature, and not as restrictive.

[0064] As used herein, “homologous” or “homology” refers to the similarity between a DNA, RNA, nucleotide, amino acid, or protein sequence to another DNA, RNA, nucleotide, amino acid, or protein sequence. Homology can be expressed in terms of a percentage of sequence identity of a first sequence to a second sequence. Percent (%) sequence identity with respect to a reference DNA sequence can be the percentage of DNA nucleotides in a candidate sequence that are identical with the DNA nucleotides in the reference DNA sequence after aligning the sequences. Percent (%) sequence identity with respect to a reference amino acid sequence can be the percentage of amino acid residues in a candidate sequence that are identical with the amino acid residues in the reference amino acid sequence after aligning the sequences and introducing gaps, if necessary, to achieve the maximum percent sequence identity, and not considering any conservative substitutions as part of the sequence identity.

[0065] As used herein, the term “antibody” refers to an immunoglobulin molecule that specifically binds to, or is immunologically reactive toward, a specific antigen. Antibody can include, for example, polyclonal, monoclonal, genetically engineered, and antigen binding fragments thereof. An antibody can be, for example, murine, chimeric, humanized, heteroconjugate, bispecific, diabody, triabody, or tetrabody. The antigen binding fragment can include, for example, Fab′, F(ab′)₂, Fab, Fv, rIgG, scFv, hcAbs (heavy chain antibodies), a single domain antibody, V_{HH}, V_{NAR}, sdAbs, or nanobody.

[0066] As used herein a “recombinant antibody” is an antibody that comprises an amino acid sequence derived from two different species or, or two different sources, and includes synthetic molecules. By way of non-limiting example, an antibody that comprises a non-human CDR and a human variable region framework or constant or Fc region, an antibody with binding domains from two different monoclonal antibodies, or an antibody comprising a mutation of one or more amino acid residues to increase or decrease biological activity or binding of a part of the antibody. In certain embodiments, recombinant antibodies are produced from a recombinant DNA molecule or synthesized. In certain embodiments, the antibodies described herein are a polypeptide(s) encoded by one or more polynucleotides.

[0067] As used herein, “recognize” refers to the association or binding between an antigen binding domain and an antigen.

[0068] As used herein, an “antigen” refers to an antigenic substance that can trigger an immune response in a host. An antigenic substance can be a molecule, such as a costimulatory molecule (e.g., CD40, OX40L, 4-1BBL, DEC-205, etc.) that can trigger an immune response in a host.

[0069] As used herein, a “tumor antigen” refers to an antigenic substance associated with a tumor or cancer cell, and that can trigger an immune response in a host.

[0070] As used herein, an “antigen on an antigen presenting cell” refers to an antigenic substance associated with an antigen presenting, and that can trigger an immune response in a host.

[0071] As used herein, an “antibody construct” refers to a construct that contains an antigen binding domain and an Fc domain.

[0072] As used herein, a binding domain refers to an antibody or non-antibody domain.

[0073] As used herein, an “antigen binding domain” refers to a binding domain from an antibody or from a non-antibody that can bind to an antigen. An antigen binding domain can be a tumor antigen binding domain or a binding domain that can bind to an antigen (such as a molecule) on an antigen presenting cell. Antigen binding domains can be numbered when there is more than one antigen binding domain in a given conjugate or antibody construct (e.g., first antigen binding domain, second antigen binding domain, third antigen binding domain, etc.). Different antigen binding domains in the same conjugate or construct can target the same antigen or different antigens (e.g., first antigen binding domain that can bind to a tumor antigen, second antigen binding domain that can bind to a molecule on an antigen presenting cell (APC antigen), and third antigen binding domain that can bind to an APC antigen).

[0074] As used herein, an “antibody antigen binding domain” refers to a binding domain from an antibody that can bind to an antigen.

[0075] As used herein, an “Fc domain” refers to an Fc domain from an antibody or from a non-antibody that can bind to an Fc receptor. As used herein, an “Fc domain” and an “Fc comprising domain” can be used interchangeably.

[0076] As used herein, a “target binding domain” refers to a construct that contains an antigen binding domain from an antibody or from a non-antibody that can bind to an antigen.

[0077] As used herein, an “ATAC” refers to a construct of an immune-stimulatory compound and a linker.

[0078] As used herein, a “conjugate” refers to an antibody construct attached to an immune-stimulatory molecule.

[0079] As used herein, a “bispecific tumor targeting antibody construct” refers to a structure that comprises a tumor antigen binding domain, a binding domain that binds to a molecule on an immune cell, such as an antigen presenting cell, and an Fc domain. A bispecific tumor targeting conjugate refers to bispecific tumor targeting antibody construct attached to an immune-stimulatory compound. As used herein, a “bispecific tumor targeting antibody construct” is used interchangeably with a “recombinant bispecific antibody”. As used herein, a “bispecific tumor targeting antibody conjugate” is used interchangeably with a “recombinant bispecific antibody conjugate”.

[0080] As used herein, an “immune cell” refers to a T cell, B cell, NK cell, NKT cell, or an antigen presenting cell. In some embodiments, an immune cell is a T cell, B cell, NK cell, or NKT cell. In some embodiments, an immune cell is an antigen presenting cell. In some embodiments, an immune cell is not an antigen presenting cell.

[0081] As used herein, “minimum anticipated biological effect level” (MABEL) is the anticipated dose needed that results in a biological effect in a human subject, in which a biological effect is measured by an in vitro, ex vivo, and/or in vivo assay that measures a selected biological, biochemical, pharmacological, or pharmacodynamic effect. A selected biological, biochemical, pharmacological, or pharmacodynamic effect can be secretion of one or more cytokines, secretion of one or more chemokines, expression level of one or more cell surface proteins associated with immune stimulation, or activity of one or more immune cell functions. Cytokine release can be measured by a cytokine release assay. Chemokine secretion can be measured by an ELISA immunoassay. Expression level of one or more cell surface proteins associated with immune stimulation can be measured by Fluorescent-Activated Cell Sorting (FACS). Activity of one or more immune cell functions can be antibody-dependent cell-mediated cytotoxicity (ADCC), antibody dependent cellular phagocytosis (ADCP), or antigen cross-presentation. ADCC can be measured by an ADCC assay. ADCP can be measured by an ACDP assay. Antigen cross-presentation can be measured by a cross-presentation assay.

[0082] As used herein, the abbreviations for the natural 1-enantiomeric amino acids are conventional and can be as follows: alanine (A, Ala); arginine (R, Arg); asparagine (N, Asn); aspartic acid (D, Asp); cysteine (C, Cys); glutamic acid (E, Glu); glutamine (Q, Gln); glycine (G, Gly); histidine (H, His); isoleucine (I, Ile); leucine (L, Leu); lysine (K, Lys); methionine (M, Met); phenylalanine (F, Phe); proline (P, Pro); serine (S, Ser); threonine (T, Thr); tryptophan (W, Trp); tyrosine (Y, Tyr); valine (V, Val). Unless otherwise specified, X can indicate any amino acid. In some aspects, X can be asparagine (N), glutamine (Q), histidine (H), lysine (K), or arginine (R).

[0083] The term “salt” or “pharmaceutically acceptable salt” refers to salts derived from a variety of organic and inorganic counter ions well known in the art. Pharmaceutically acceptable acid addition salts can be formed with inorganic acids and organic acids. Inorganic acids from which salts can be derived include, for example, hydrochloric acid, hydrobromic acid, sulfuric acid, nitric acid, phosphoric acid, and the like. Organic acids from which salts can be derived include, for example, acetic acid, propionic acid, glycolic acid, pyruvic acid, oxalic acid, maleic acid, malonic acid, succinic acid, fumaric acid, tartaric acid, citric acid, benzoic acid, cinnamic acid, mandelic acid, methanesulfonic acid, ethanesulfonic acid, p-toluenesulfonic acid, salicylic acid, and the like. Pharmaceutically acceptable base addition salts can be formed with inorganic and organic bases. Inorganic bases from which salts can be derived include, for example, sodium, potassium, lithium, ammonium, calcium, magnesium, iron, zinc, copper, manganese, aluminum, and the like. Organic bases from which salts can be derived include, for example, primary, secondary, and tertiary amines, substituted amines including naturally occurring substituted amines, cyclic amines, basic ion exchange resins, and the like, specifically such as isopropylamine, trimethylamine, diethylamine, triethylamine, tripropylamine, and ethanolamine. In some embodiments, the pharmaceutically acceptable base addition salt is chosen from ammonium, potassium, sodium, calcium, and magnesium salts.

[0084] The term “C_{x-y}” when used in conjunction with a chemical moiety, such as alkyl, alkenyl, or alkynyl is meant to include groups that contain from x to y carbons in the chain. For example, the term “C_{x-y}alkyl” refers to substituted or unsubstituted saturated hydrocarbon groups, including straight-chain alkyl and branched-chain alkyl groups that contain from x to y carbons in the chain, including haloalkyl groups such as trifluoromethyl and 2,2,2-trifluoroethyl, etc.

[0085] The terms “C_{x-y}alkenyl” and “C_{x-y}alkynyl” refer to substituted or unsubstituted unsaturated aliphatic groups analogous in length and possible substitution to the alkyls described above, but that contain at least one double or triple bond respectively.

[0086] The term “carbocycle” as used herein refers to a saturated, unsaturated or aromatic ring in which each atom of the ring is carbon. Carbocycle includes 3- to 10-membered monocyclic rings, 6- to 12-membered bicyclic rings, and 6- to 12-membered bridged rings. Each ring of a bicyclic carbocycle may be selected from saturated, unsaturated, and aromatic rings. In an exemplary embodiment, an aromatic ring, e.g., phenyl, may be fused to a saturated or unsaturated ring, e.g., cyclohexane, cyclopentane, or cyclohexene. Any combination of saturated, unsaturated and aromatic bicyclic rings, as valence permits, is included in the definition of carbocyclic. Exemplary carbocycles include cyclopentyl, cyclohexyl, cyclohexenyl, adamantyl, phenyl, indanyl, and naphthyl.

[0087] The term “heterocycle” as used herein refers to a saturated, unsaturated or aromatic ring comprising one or more heteroatoms. Exemplary heteroatoms include N, O, Si, P, B, and S atoms. Heterocycles include 3- to 10-membered monocyclic rings, 6- to 12-membered bicyclic rings, and 6- to 12-membered bridged rings. Each ring of a bicyclic heterocycle may be selected from saturated, unsaturated, and aromatic rings wherein at least one of the rings includes a heteroatom. In an exemplary embodiment, an aromatic ring, e.g., pyridyl, may be fused to a saturated or unsaturated ring, e.g., cyclohexane, cyclopentane, morpholine, piperidine or cyclohexene. The term “heteroaryl” includes aromatic single ring structures, preferably 5- to 7-membered rings, more preferably 5- to 6-membered rings, whose ring structures include at least one heteroatom, preferably one to four heteroatoms, more preferably one or two heteroatoms. The term “heteroaryl” also include polycyclic ring systems having two or more cyclic rings in which two or more carbons are common to two adjoining rings wherein at least one of the rings is heteroaromatic, e.g., the other cyclic rings can be aromatic or non-aromatic carbocyclic, or heterocyclic. Heteroaryl groups include, for example, pyrrole, furan, thiophene, imidazole, oxazole, thiazole, pyrazole, pyridine, pyrazine, pyridazine, and pyrimidine, and the like.

[0088] The term “substituted” refers to moieties having substituents replacing a hydrogen on one or more carbons or substitutable heteroatoms, e.g., NH, of the structure. It will be understood that “substitution” or “substituted with” includes the implicit proviso that such substitution is in accordance with permitted valence of the substituted atom and the substituent, and that the substitution results in a stable compound, i.e., a compound which does not spontaneously, undergo transformation such as by rearrangement, cyclization, elimination, etc. In certain embodiments, substituted refers to moieties having substituents replacing two hydrogen atoms on the same carbon atom, such as substituting the two hydrogen atoms on a single carbon with an oxo, imino or thioxo group. As used herein, the term “substituted” is contemplated to include all permissible substituents of organic compounds. In a broad aspect, the permissible substituents include acyclic and cyclic, branched and unbranched, carbocyclic and heterocyclic, aromatic and non-aromatic substituents of organic compounds. The permissible substituents can be one or more and the same or different for appropriate organic compounds. For purposes of this disclosure. the heteroatoms such as nitrogen may have hydrogen substituents and/or any permissible substituents of organic compounds described herein which satisfy the valences of the heteroatoms.

[0089] In some embodiments, substituents may include any substituents described herein, for example: halogen, hydroxy, oxo (═O), thioxo (═S), cyano (—CN), nitro (—NO₂), imino (═N—H), oximo (═N—OH), hydrazino (═N—NH₂), —R^{b}—OR^{a}, —R^{b}—OC(O)—R^{a}, —R^{b}—OC(O)—OR^{a}, —R^{b}—OC(O)—N(R^{a})₂, —R^{b}—N(R^{a})₂, —R^{b}—C(O)R^{a}, —R^{b}—C(O)OR^{a}, —R^{b}—C(O)N(R^{a})₂, —R^{b}—O—R^{c}—C(O)N(R^{a})₂, —R^{b}—N(R^{a})C(O)OR^{a}, —R^{b}—N(R^{a})C(O)R^{a}, —R^{b}—N(R^{a})S(O)ₜR^{a} (where t is 1 or 2), —R^{b}—S(O)ₜR^{a} (where t is 1 or 2), —R^{b}—S(O)ₜOR^{a} (where t is 1 or 2), and —R^{b}—S(O)ₜN(R^{a})₂ (where t is 1 or 2); and alkyl, alkenyl, alkynyl, aryl, aralkyl, aralkenyl, aralkynyl, cycloalkyl, cycloalkylalkyl, heterocycloalkyl, heterocycloalkylalkyl, heteroaryl, and heteroarylalkyl any of which may be optionally substituted by alkyl, alkenyl, alkynyl, halogen, haloalkyl, haloalkenyl, haloalkynyl, oxo (═O), thioxo (═S), cyano (—CN), nitro (—NO₂), imino (═N—H), oximo (═N—OH), hydrazine (═N—NH₂), —R^{b}—OR^{a}, —R^{b}—OC(O)—R^{a}, —R^{b}—OC(O)—OR^{a}, —R^{b}—OC(O)—N(R^{a})₂, —R^{b}—N(R^{a})₂, —R^{b}—C(O)R^{a}, —R^{b}—C(O)OR^{a}, —R^{b}—C(O)N(R^{a})₂, —R^{b}—O—R^{c}—C(O)N(R^{a})₂, —R^{b}—N(R^{a})C(O)OR^{a}, —R^{b}—N(R^{a})C(O)R^{a}, —R^{b}—N (R^{a})S(O)ₜR^{a} (where t is 1 or 2), —R^{b}—S(O)ₜR^{a} (where t is 1 or 2), —R^{b}—S(O)ₜOR^{a} (where t is 1 or 2) and —R^{b}—S(O)ₜN(R^{a})₂ (where t is 1 or 2); wherein each R^{a} is independently selected from hydrogen, alkyl, cycloalkyl, cycloalkylalkyl, aryl, aralkyl, heterocycloalkyl, heterocycloalkylalkyl, heteroaryl, or heteroarylalkyl, wherein each R^{a}, valence permitting, may be optionally substituted with alkyl, alkenyl, alkynyl, halogen, haloalkyl, haloalkenyl, haloalkynyl, oxo (═O), thioxo (═S), cyano (—CN), nitro (—NO₂), imino (═N—H), oximo (═N—OH), hydrazine (═N—NH₂), —R^{b}—OR^{a}, —R^{b}—OC(O)—R^{a}, —R^{b}—OC(O)—OR^{a}, —R^{b}—OC(O)—N(R^{a})₂, —R^{b}—N(R^{a})₂, —R^{b}—C(O)R^{a}, —R^{b}—C(O)OR^{a}, —R^{b}—C(O)N(R^{a})₂, —R^{b}—O—R^{c}—C(O)N(R^{a})₂, —R^{b}—N(R^{a})C(O)OR^{a}, —R^{b}—N(R^{a})C(O)R^{a}, —R^{b}—N (R^{a})S(O)ₜR^{a} (where t is 1 or 2), —R^{b}—S(O)ₜR^{a} (where t is 1 or 2), —R^{b}—S(O)ₜOR^{a} (where t is 1 or 2) and —R^{b}—S(O)ₜN(R^{a})₂ (where t is 1 or 2); and wherein each R^{b} is independently selected from a direct bond or a straight or branched alkylene, alkenylene, or alkynylene chain, and each R^{c} is a straight or branched alkylene, alkenylene or alkynylene chain.

[0090] It will be understood by those skilled in the art that substituents can themselves be substituted, if appropriate. Unless specifically stated as “unsubstituted,” references to chemical moieties herein are understood to include substituted variants. For example, reference to a “heteroaryl” group or moiety implicitly includes both substituted and unsubstituted variants.

[0091] Chemical entities having carbon-carbon double bonds or carbon-nitrogen double bonds may exist in Z- or E-form (or cis- or trans-form). Furthermore, some chemical entities may exist in various tautomeric forms. Unless otherwise specified, chemical entities described herein are intended to include all Z-, E- and tautomeric forms as well.

[0092] A “tautomer” refers to a molecule wherein a proton shift from one atom of a molecule to another atom of the same molecule is possible. The compounds presented herein, in certain embodiments, exist as tautomers. In circumstances where tautomerization is possible, a chemical equilibrium of the tautomers will exist. The exact ratio of the tautomers depends on several factors, including physical state, temperature, solvent, and pH. Some examples of tautomeric equilibrium include:

[chemical structure]

[0093] The compounds disclosed herein, in some embodiments, are used in different enriched isotopic forms, e.g., enriched in the content of ²H, ³H, C, ¹³C and/or ¹⁴C. In one particular embodiment, the compound is deuterated in at least one position. Such deuterated forms can be made by the procedure described in U.S. Pat. Nos. 5,846,514 and 6,334,997. As described in U.S. Pat. Nos. 5,846,514 and 6,334,997, deuteration can improve the metabolic stability and or efficacy, thus increasing the duration of action of drugs.

[0094] Unless otherwise stated, structures depicted herein are intended to include compounds which differ only in the presence of one or more isotopically enriched atoms. For example, compounds having the present structures except for the replacement of a hydrogen by a deuterium or tritium, or the replacement of a carbon by ¹³C- or ¹⁴C-enriched carbon are within the scope of the present disclosure.

[0095] The compounds of the present disclosure optionally contain unnatural proportions of atomic isotopes at one or more atoms that constitute such compounds. For example, the compounds may be labeled with isotopes, such as for example, deuterium (²H), tritium (³H), iodine-125 (¹²⁵I) or carbon-14 (¹⁴C). Isotopic substitution with ²H, ¹¹C, ¹³C, ¹⁴C, ¹⁵C, ¹²N, ¹³N, ¹⁵N, ¹⁶N, ¹⁶O, ¹⁷O, ¹⁴F, ¹⁵F, ¹⁶F, ¹⁷F, ¹⁸F, ³³S, ³⁴S, ³⁵S, ³⁶S, ³⁵Cl, ³⁷Cl, ⁷⁹Br, ⁸¹Br, ¹²⁵I are all contemplated. All isotopic variations of the compounds of the present invention, whether radioactive or not, are encompassed within the scope of the present invention.

[0096] In certain embodiments, the compounds disclosed herein have some or all of the ¹H atoms replaced with ²H atoms. The methods of synthesis for deuterium-containing compounds are known in the art and include, by way of non-limiting example only, the following synthetic methods.

[0097] Deuterium substituted compounds are synthesized using various methods such as described in: Dean, Dennis C.; Editor. Recent Advances in the Synthesis and Applications of Radiolabeled Compounds for Drug Discovery and Development. [In: Curr., Pharm. Des., 2000; 6(10)] 2000, 110 pp; George W.; Varma, Rajender S. The Synthesis of Radiolabeled Compounds via Organometallic Intermediates, Tetrahedron, 1989, 45(21), 6601-21; and Evans, E. Anthony. Synthesis of radiolabeled compounds, J. Radioanal. Chem., 1981, 64(1-2), 9-32.

[0098] Deuterated starting materials are readily available and are subjected to the synthetic methods described herein to provide for the synthesis of deuterium-containing compounds. Large numbers of deuterium-containing reagents and building blocks are available commercially from chemical vendors, such as Aldrich Chemical Co.

[0099] Compounds of the present invention also include crystalline and amorphous forms of those compounds, pharmaceutically acceptable salts, and active metabolites of these compounds having the same type of activity, including, for example, polymorphs, pseudopolymorphs, solvates, hydrates, unsolvated polymorphs (including anhydrates), conformational polymorphs, and amorphous forms of the compounds, as well as mixtures thereof.

[0100] The phrases “parenteral administration” and “administered parenterally” as used herein means modes of administration other than enteral and topical administration, usually by injection, and includes, without limitation, intravenous, intramuscular, intraarterial, intrathecal, intracapsular, intraorbital, intracardiac, intradermal, intraperitoneal, transtracheal, subcutaneous, subcuticular, intraarticular, subcapsular, subarachnoid, intraspinal and intrasternal injection and infusion.

[0101] The phrase “pharmaceutically acceptable” is employed herein to refer to those compounds, materials, compositions, and/or dosage forms which are, within the scope of sound medical judgment, suitable for use in contact with the tissues of human beings and animals without excessive toxicity, irritation, allergic response, or other problem or complication, commensurate with a reasonable benefit/risk ratio.

[0102] The phrase “pharmaceutically acceptable excipient” or “pharmaceutically acceptable carrier” as used herein means a pharmaceutically acceptable material, composition or vehicle, such as a liquid or solid filler, diluent, excipient, solvent or encapsulating material. Each carrier must be “acceptable” in the sense of being compatible with the other ingredients of the formulation and not injurious to the patient. Some examples of materials which can serve as pharmaceutically acceptable carriers include: (1) sugars, such as lactose, glucose and sucrose; (2) starches, such as corn starch and potato starch; (3) cellulose, and its derivatives, such as sodium carboxymethyl cellulose, ethyl cellulose and cellulose acetate; (4) powdered tragacanth; (5) malt; (6) gelatin; (7) talc; (8) excipients, such as cocoa butter and suppository waxes; (9) oils, such as peanut oil, cottonseed oil, safflower oil, sesame oil, olive oil, corn oil and soybean oil; (10) glycols, such as propylene glycol; (11) polyols, such as glycerin, sorbitol, mannitol and polyethylene glycol; (12) esters, such as ethyl oleate and ethyl laurate; (13) agar; (14) buffering agents, such as magnesium hydroxide and aluminum hydroxide; (15) alginic acid; (16) pyrogen-free water; (17) isotonic saline; (18) Ringer's solution; (19) ethyl alcohol; (20) phosphate buffer solutions; and (21) other non-toxic compatible substances employed in pharmaceutical formulations.

[0103] An antigen can elicit an immune response. An antigen can be a protein, polysaccharide, lipid, or glycolipid, which can be recognized by an immune cell, such as a T cell or a B cell. Exposure of immune cells to one or more of these antigens can elicit a rapid cell division and differentiation response resulting in the formation of clones of the exposed T cells and B cells. B cells can differentiate into plasma cells which in turn can produce antibodies which selectively bind to the antigens.

[0104] The terms “cancer” and “tumor” relate to the physiological condition in mammals characterized by deregulated cell growth. Cancer is a class of diseases in which a group of cells display uncontrolled growth or unwanted growth. Cancer cells can also spread to other locations, which can lead to the formation of metastases. Spreading of cancer cells in the body can, for example, occur via lymph or blood. Uncontrolled growth, intrusion and metastasis formation are also termed malignant properties of cancers. These malignant properties differentiate cancers from benign tumors, which typically do not invade or metastasize.

[0105] In cancer, there are four general groups of tumor antigens: (i) viral tumor antigens which can be identical for any viral tumor of this type, (ii) carcinogenic tumor antigens which can be specific for patients and for the tumors, (iii) isoantigens of the transplantation type or tumor-specific transplantation antigens which can be different in all individual types of tumor but can be the same in different tumors caused by the same virus; and (iv) embryonic antigens.

[0106] As a result of the discovery of tumor antigens, tumor antigens have become important in the development of new cancer treatments that can specifically target the cancer. This has led to the development of antibodies directed against these tumor antigens.

[0107] In addition to the development of antibodies against tumor antigens for cancer treatment, antibodies that target immune cells to boost the immune response have also been developed. For example, an anti-CD40 antibody that is a CD40 agonist can be used to activate dendritic cells to enhance the immune response.

[0108] Cluster of Differentiation 40 (CD40) is a member of the Tumor Necrosis Factor Receptor (TNF-R) family. CD40 can be a 50 kDa cell surface glycoprotein that can be constitutively expressed in normal cells, such as monocytes, macrophages, B lymphocytes, dendritic cells, endothelial cells, smooth muscle cells, fibroblasts and epithelium, and in tumor cells, including B-cell lymphomas and many types of solid tumors. Expression of CD40 can be increased in antigen presenting cells in response to IL-βp, IFN-γ, GM-CSF, and LPS induced signaling events.

[0109] Humoral and cellular immune responses can be regulated, in part, by CD40. For example, in the absence of CD40 activation by its cognate binding partner, CD40 Ligand (CD40L), antigen presentation can result in tolerance. However, CD40 activation can ameliorate tolerance. In addition, CD40 activation can positively impact immune responses by enhancing antigen presentation by antigen presenting cells (APC), increasing cytokine and chemokine secretion, stimulating expression of and signaling by co-stimulatory molecules, and activating the cytolytic activity of different types of immune cells. Accordingly, the interaction between CD40 and CD40L can be essential to maintain proper humoral and cellular immune responses.

[0110] The intracellular effects of CD40 and CD40L interaction can include association of the CD40 cytoplasmic domain with TRAFs (TNF-R associated factors), which can lead to the activation of NFκB and Jun/AP1 pathways. While the response to activation of NFκB and Jun/AP1 pathways can be cell type-specific, often such activation can lead to increased production and secretion of cytokines, including IL-6, IL-8, IL-12, IL-15; increased production and secretion of chemokines, including MIP1α and β and RANTES; and increased expression of cellular adhesion molecules, including ICAM. While the effects of cytokines, chemokines and cellular adhesion molecules can be widespread, such effects can include enhanced survival and activation of T cells.

[0111] In addition to the enhanced immune responses induced by CD40 activation, CD40 activation can also be involved in chemokine- and cytokine-mediated cellular migration and differentiation; activation of immune cells, including monocytes; activation of and increased cytolytic activity of immune cells, including cytolytic T lymphocytes and natural killer cells; induction of CD40-positive tumor cell apoptosis and enhanced immunogenicity of CD40-positive tumors. In addition, CD40 can initiate and enhance immune responses by many different mechanisms, including, inducing antigen-presenting cell maturation and increased expression of costimulatory molecules, increasing production of and secretion of cytokines, and enhancing effector functions.

[0112] CD40 activation can be effective for inducing immune-mediated antitumor responses. For example, CD40 activation reverses host immune tolerance to tumor-specific antigens which leads to enhanced antitumor responses by T cells. Such antitumor activity can also occur in the absence of immune cells. Similarly, antitumor effects can occur in response to anti-CD40 antibody-mediated activation of CD40 and can be independent of or can involve antibody-dependent cellular cytotoxicity (ADCC). In addition to other CD40-mediated mechanisms of antitumor effects, CD40L-stimulation can cause dendritic cell maturation and stimulation. CD40L-stimulated dendritic cells can contribute to the antitumor response. Furthermore, vaccination strategies including CD40 can result in regression of CD40-positive and CD40-negative tumors.

[0113] CD40 activating antibodies (e.g., anti-CD40 activating monoclonal antibodies) can be useful for treatment of tumors. This can occur through one or more mechanisms, including cell activation, antigen presentation, production of cytokines and chemokines, amongst others. For example, CD40 antibodies activate dendritic cells, leading to processing and presentation of tumor antigens as well as enhanced immunogenicity of CD40-positive tumor cells. Not only can enhanced immunogenicity result in activation of CD40-positive tumor specific CD4⁺ and CD8⁺ T cells, but further antitumor activity can include, recruitment and activation monocytes, enhanced cytolytic activity of cytotoxic lymphocytes and natural killer cells as well as induction of apoptosis or by stimulation of a humoral response so as to directly target tumor cells. In addition, tumor cell debris, including tumor-specific antigens, can be presented to other cells of the immune system by CD40-activated antigen presenting cells.

[0114] Since CD40 can be important in an immune response, there is a need for enhanced CD40 meditated signaling events to provide reliable and rapid treatment options to patients suffering from diseases which may be ameliorated by treatment with CD40-targeted therapeutic strategies.

[0115] The CD40 mediated immune response can be further enhanced by targeting CD40 activation to the localized tumor site(s) through pairing with a tumor antigen binding domain. Such targeted CD40 activation and recruitment of immune cells to tumor cells may provide the advantage of maintaining therapeutic effectiveness with a lower dosage of a CD40 activating antibody construct or conjugate. A lower dosage may help mitigate any side effects of systemic CD40 activation such as cytokine release syndrome, which has been observed in some subjects treated with the agonistic CD40 monoclonal antibodies such as CP-870,893, dacetuzumab, Chi Lob 7/4, SEA-CD40, ADC-1013, 3C3, or 3G5. Systemic CD40 activation may also pose a risk of autoimmunity by causing APCs to break tolerance of autoantigens. For example, autoreactive T cells that manage to evade thymic selection may persist in the periphery in a state of tolerance against autoantigens, but CD40 activation can cause them to break tolerance and exhibit an autoimmune response. Accordingly, there is an important need for therapeutic, clinically relevant targeted CD40 activation that is enhanced at the localized tumor site relative to systemic activation. The presently described conjugate can be utilized as a safe and effective strategy to enhance the immune response. A conjugate can comprise an antigen binding domain and a CD40 binding domain, wherein the antigen binding domain specifically binds to a tumor antigen, wherein the CD40 binding domain comprises a CD40 agonist. This combination of a tumor antigen binding domain and a CD40 agonist can provide enhanced CD40 activation and recruitment of immune cells to the localized tumor site.

[0116] In addition to targeting immune cells to boost the immune response using anti-CD40 antibodies, antibodies that target other antigens expressed by immune cells have been developed. For example, an anti-DEC205 antibody, an anti-CD36 mannose scavenger receptor 1 antibody, an anti-CLEC9A antibody, CLEC12A, an anti-DC-SIGN antibody, an anti-BDCA-2 antibody, an anti-OX40L antibody, an anti-41BBL antibody, an anti-CD204 antibody, an anti-MARCO antibody, an anti-CLEC5A antibody, an anti-Dectin 1 antibody, and anti-Dectin 2 antibody, an anti-CLEC10A antibody, an anti-CD206 antibody, an anti-CD64 antibody, an anti-CD32A antibody, an anti-CD16A antibody, an anti-HVEM antibody, an anti-PD-L1 antibody, an anti-CD32B antibody or an anti-CD47 antibody can be used to target, respectively, surface DEC-205, CD36 mannose scavenger receptor 1, CLEC9A, CLEC12A, DC-SIGN, BDCA-2, OX40L, 41BBL, CD204, MARCO, CLEC5A, Dectin 1, Dectin 2, CLEC10A, CD206, CD64, CD32A, CD16A, HVEM, PD-L1, or CD32B molecules expressed by antigen presenting cells or CD47 molecules expressed by T cells.

[0117] Cluster of Differentiation 205 (CD205 or DEC-205) is a member of the C-type multilectin family of endocytic receptors, which can include the macrophage mannose receptor (MMR) and the phospholipase A2 receptor (PLA₂R). DEC-205 can be a 205 kDa endocytic receptor highly expressed in cortical thymic epithelial cells, thymic medullary dendritic cells (CD11c⁺ CD8⁺), subpopulations of peripheral dendritic cells (CD11c⁺ CD8⁺). The DEC-205⁺ CD11c⁺ CD8⁺ dendritic cells (DCs) can function in cross-presentation of antigens derived from apoptotic cells. Additionally, DEC-205 can be significantly upregulated during DC maturation. DEC-205 can also be expressed at moderate levels in B cells and low levels in macrophages and T cells.

[0118] After antigen binding to DEC-205, the receptor-antigen complex can be internalized whereupon the antigen can be processed and be presented on the DC surface by a major histocompatibility complex class II (MHC II) or MHC class I. DEC-205 can deliver antigen to DCs for antigen presentation on MHC class II and cross-presentation on MHC class I. DEC-205 mediated antigen delivery for antigen presentation in DCs without an inflammatory stimulus can result in tolerance. Conversely, DEC-205 mediated antigen delivery in DCs in the presence of a maturational stimulus (e.g. a CD40 agonist) can result in long-term immunity via activation of antigen-specific CD4⁺ and CD8⁺ T cells.

[0119] CD36 mannose scavenger receptor 1 is an oxidized LDL receptor with two transmembrane domains located in the caveolae of the plasma membrane. It can be classified as a Class B scavenger receptor, which can be characterized by involvement in the removal of foreign substances and waste materials. This receptor can also be involved in cell adhesion, phagocytosis of apoptotic cells, and metabolism of long-chain fatty acids.

[0120] CLEC9A is a group V C-type lectin receptor. This receptor can be expressed as on myeloid lineage cells, and can be characterized as an activation receptor.

[0121] CLEC12A is a member of the C-type lectin/C-type lectin like domain super family that can be a negative regulator of granulocyte and monocyte function. It can also be involved in cell adhesion, cell-cell signaling, and glycoprotein turnover, and can play a role in the inflammatory response.

[0122] Dendritic cell-specific inter cellular adhesion molecule-3-grabbing non-integrin (DC-SIGN) or CD209, is a C-type lectin receptor that can be expressed on the surface of macrophages and dendritic cells. This receptor can recognize and bind to mannose type carbohydrates and be involved in activating phagocytosis, can mediate dendritic cell rolling, and can be involved in CD4+ T cell activation.

[0123] BDCA-2 is a C-type lectin that is a membrane protein of plasmacytoid dendritic cells. It can be involved in plasmacytoid dendritic cell function, such as ligand internalization and presentation.

[0124] OX40L, which can also be referred to as CD252, is the ligand for CD134 that can be expressed on dendritic cells. It can be involved in T cell activation.

[0125] 41BBL, which can also be referred to as CD137L, is a member of the TNF superfamily, and can be expressed on B cells, dendritic cells, activated T cells, and macrophages. It can provide co-stimulatory signal for T cell activation and expansion.

[0126] CD204, which can also be referred to as macrophage scavenger receptor 1, is a macrophage scavenger receptor receptor. The gene for CD204 can encode three different class A macrophage scavenger receptor isoforms. The type 1 and type 2 isoforms can be involved in binding, internalizing, and processing negatively charged macromolecules, such as low density lipoproteins. The type 3 isoform can undergo altered intracellular processing in which it can be retained within the endoplasmic reticulum, and has been shown to have a dominant negative effect on the type 1 and type 2 isoforms.

[0127] Macrophage receptor with collagenous structure (MARCO), which can also be referred to as SCARA2, is a class A scavenger receptor with collagen-like and cysteine-rich domains. It can be expressed in macrophages, and can bind to modified low density lipoproteins. It can be involved in the removal of foreign substances and waste materials.

[0128] C-type lectin domain family 5 member A (CLEC5A) is a C-type lectin. It can be involved in the myeloid lineage activating pathway.

[0129] Dendritic cell-associated c-type lectin-1 (Dectin 1), which can also be referred to as CLEC7A, is member of the C-type lectin/C-type lectin-like super family. It can be expressed by myeloid dendritic cells, monocytes, macrophages, and B cells, and can be involved in antifungal immunity.

[0130] Dendritic cell-associated c-type lectin-2 (Dectin 2), which can also be referred to as CLEC6A, is member of the C-type lectin/C-type lectin-like super family. It can be expressed by dendritic cells, macrophages, monocytes and neutrophils. It can be involved in antifungal immunity.

[0131] CLEC10A, which can also be referred to as CD301, is member of the C-type lectin/C-type lectin-like super family. It can be expressed by dendritic cells, monocytes, and CD33+ myeloid cells, and can be involved in macrophage adhesion and migration.

[0132] CD206, which can also be referred to as macrophage mannose receptor, is a C-type lectin type I membrane glycoprotein. It can be expressed on dendritic cells, macrophages and endothelial cells, and can act as a pattern recognition receptor and bind high-mannose structures of viruses, bacteria, and fungi.

[0133] CD64, which can also be referred to as FcγRI, is a high affinity Fc receptor for IgG. It can be expressed by monocytes and macrophages. It can be involved in mediating phagocytosis, antigen capture, and antibody dependent cell-mediated cytoxicity.

[0134] CD32A, which can also be referred to as FcγRIIa, is a low affinity Fc receptor. It can be expressed on monocytes, granulocytes, B cells, and eosinophils. It can be involved in phagocytosis, antigen capture, and antibody dependent cell-mediated cytoxicity.

[0135] CD16A, which can also be referred to as FcγRIIIa, is low affinity Fc receptor. It can be expressed on NK cells, and can be involved in phagocytosis and antibody dependent cell-mediated cytotoxicity.

[0136] Herpesvirus entry mediator (HVEM), which can also be referred to as CD270, is a member of the TNF-receptor superfamily. It can be expressed on B cells, dendritic cells, T cells, NK cells, CD33+ myeloid cells, and monocytes. It can be involved in activating the immune response.

[0137] CD32B, which can also be referred to as FcγRIIb, is a low affinity Fc receptor. It can be expressed on B cells and myeloid dendritic cells. It can be involved in inhibiting maturation and cell activation of dendritic cells.

[0138] The HER2/neu (human epidermal growth factor receptor 2/receptor tyrosine-protein kinase erbB-2) is part of the human epidermal growth factor family. Overexpression of this protein can be shown to play an important role in the progression of cancer, for example, breast cancer. The HER2/neu protein can function as a receptor tyrosine kinase and autophosphorylates upon dimerization with binding partners. HER2/neu can activate several signaling pathways including, for example, mitogen-activated protein kinase, phosphoinositide 3-kinase, phospholipase Cγ, protein kinase C, and signal transducer and activator of transcription (STAT). Examples of antibodies that can target and inhibit HER2/neu can include trastuzumab and pertuzumab.

[0139] EGFR (epidermal growth factor receptor) encodes a member of the human epidermal growth factor family. Mutations that can lead to EGFR overexpression or over activity can be associated with a number of cancers, including squamous cell carcinoma and glioblastomas. EGFR can function as a receptor tyrosine kinase and ligand binding can trigger dimerization with binding partners and autophosphorylation. The phosphorylated EGFR can then activate several downstream signaling pathways including mitogen-activated protein kinase, phosphoinositide 3-kinase, phospholipase Cγ, protein kinase C, and signal transducer and activator of transcription (STAT). Examples of antibodies that can target and inhibit EGFR can include cetuximab, panutumumab, nimotuzumab, and zalutumumab. One mutant variant of EGFR is EGFRvIII (epidermal growth factor receptor variant III). EGFRvIII can be the result of an EGFR gene rearrangement in which exons 2-7 of the extracellular domain are deleted. This mutation can result in a mutant receptor incapable of binding to any known ligand. The resulting receptor can engage in a constitutive low-level signaling and can be implicated in tumor progression. Examples of antibodies that can target EGFRvIII can include AMG595 and ABT806.

[0140] C-Met (hepatocyte growth factor receptor) encodes a member of the receptor tyrosine kinase family of proteins. C-Met overexpression and over activity can be implicated in various cancers including lung adenocarcinomas, and high c-Met levels can be associated with poor patient outcome. Binding of hepatocyte growth factor can induce dimerization and autophosphorylation of c-Met. The c-Met receptor can activate various downstream signaling pathways including mitogen-activated protein kinase, phosphoinositide 3-kinase, and protein kinase C pathways. The antibody onartuzumab can target and inhibit c-Met.

[0141] HER3 (human epidermal growth factor receptor 3) encodes a member of the human epidermal growth factor receptor family. Ligand binding can induce dimerization and autophosphorylation of cytoplasmic tyrosine residues that then can recruit signaling proteins for downstream signaling pathway activation including mitogen-activated protein kinase and phosphoinoside 3-kinase pathways. HER3 can play an active role in cell proliferation and survival, and can be overexpressed, overactive, and/or mutated in various cancers. For example, HER3 can be overexpressed in breast, ovarian, prostate, colon, pancreas, stomach, oral, and lung cancers. The antibody patritumab can target and inhibit HER3.

[0142] MUC1 (mucin 1, cell surface associated) encodes a member of the mucin family of glycosylated proteins that can play an important role in cell adhesion and forming protective mucosal layers on epithelial surfaces. MUC1 can be proteolytically cleaved into alpha and beta subunits that form a heterodimeric complex with the N-terminal alpha subunit providing cell-adhesion functionality and the C-terminal beta subunit modulating cell signaling pathways including the mitogen activated map kinase pathway. MUC1 can play a role in cancer progression, for example, by regulating TP53-mediated transcription. MUC1 overexpression, aberrant intracellular localization, and glycosylation changes can all be associated with carcinomas including pancreatic cancer cells. The antibody clivatuzumab can target MUC1.

[0143] MUC16 (mucin 16, cell surface associated) encodes the largest member of the mucin family of glycosylated proteins that can play an important role in cell adhesion and forming protective mucosal layers on epithelial surfaces. MUC16 can be a highly glycosylated 2.5 MDa transmembrane protein that can provide a hydrophilic lubricating barrier on epithelial cells. The cytoplasmic tail of MUC16 can be involved with various signaling pathways including the JAK2-STAT3 and Src kinase pathways. A peptide epitope of MUC16 can be used as biomarker for detecting ovarian cancer. Elevated expression of MUC16 can be present in advanced ovarian cancers and pancreatic cancers. The antibody sofituzumab can target MUC16.

[0144] EPCAM (epithelial cell adhesion molecule) encodes a transmembrane glycoprotein that can be frequently and highly expressed in carcinomas and tumor-initiating cells. EPCAM can also be a pluripotent stem cell marker. EPCAM can modulate a variety of pathways including cell-cell adhesion, cellular proliferation, migration, invasion, maintenance of a pluripotent state, and differentiation in the context of tumor cells. The antibodies edrecolomab and adecatumumab can target EPCAM.

[0145] MSLN (mesothelin) encodes a 40 kDa cell GPI-anchored membrane surface protein believed to function in cell adhesion. MSLN is overexpressed in mesothelioma and certain types of pancreatic, lung, and ovarian cancers. MSLN-related peptides that circulate in serum of patients suffering from pleural mesothelioma are used as biomarkers for monitoring the disease. MSLN may promote metastasis by inducing matrix metalloproteinase 7 and 9 expression. The monoclonal antibody anetumab has been developed to target MSLN.

[0146] CA6 (carbonic anhydrase VI) encodes one of several isozymes of carbonic anhydrase. CA6 is found in salivary glands and may play a role in the reversible hydration of carbon dioxide. CA6 is expressed in human serous ovarian adenocarcinomas. The monoclonal antibody huDS6 has been developed to target CA6.

[0147] NAPI2B (sodium/phosphate cotransporter 2B) encodes a type II sodium-phosphate cotransporter. NAPI2B is highly expressed on the tumor surface in lung, ovarian, and thyroid cancers as well as in normal lung pneumocytes. The monoclonal antibody lifastuzumab has been developed to target NAPI2B.

[0148] TROP2 (trophoblast antigen 2) encodes a transmembrane glycoprotein that acts as an intracellular calcium signal transducer. TROP2 binds to multiple factors such as IGF-1, claudin-1, claudin-7, cyclin Dl, and PKC. TROP2 including intracellular calcium signaling and the mitogen activated protein kinase pathway. TROP 2 plays a role in cell self-renewal, proliferation, invasion, and survival. Discovered first in trophoblast cells that have the ability to invade uterine decidua during placental implantation, TROP2 overexpression has been shown to be capable of stimulating cancer growth. TROP2 overexpression has been observed in breast, cervix, colorectal, esophagus, lung, non-Hodgkin's lymphoma, chronic lymphocytic lymphoma, Raji Burkitt lymphoma, oral squamous cell, ovarian, pancreatic, prostate, stomach, thyroid, urinary bladder, and uterine carcinomas. The monoclonal antibody sactuzumab has been developed to target TROP2.

[0149] CEA (carcinoembryonic antigen) encodes a family of related glycoproteins involved in cell adhesion. CEA is a biomarker for gastrointestinal cancers and may promote tumor development by means of its cell adhesion function. CEA levels have been found to be elevated in serum of individuals with colorectal carcinoma. CEA levels have also been found to be elevated in gastric carcinoma, pancreatic carcinoma, lung carcinoma, breast carcinoma, and medullary thyroid carcinoma. The monoclonal antibodies PR1A3 and Ab2-3 have been developed to target CEA.

[0150] CLDN18.2 (claudin 18) encodes a member of the claudin family of integral membrane proteins. CLDN18.2 is a component of tight junctions that create a physical barrier to prevent diffusion of solutes and water through the paracellular space between epithelial cells. CLDN18.2 is overexpressed in infiltrating ductal adenocarcinomas, but is reduced in some gastric carcinomas. The monoclonal antibody claudiximab has been developed to target CLDN18.2.

[0151] FAP (fibroblast activation protein, alpha) encodes a homodimeric integral membrane protein from a family of serine proteases. FAP is believed to play a role in many processes including tissue remodeling, fibrosis, wound healing, inflammation, and tumor growth. FAP enhances tumor growth and invasion by promoting angiogenesis, collagen fiber degradation and apoptosis, and by downregulating the immune response. FAP is selectively expressed on fibroblasts within the tumor stroma. The monoclonal antibody sibrotuzumab has been developed to target FAP.

[0152] EphA2 (EPH Receptor A2) encodes a member of the ephrin receptor subfamily of the protein-tyrosine kinase family. EphA2 binds to ephrin-A ligands. Activation of EphA2 receptor upon ligand binding can result in modulation of migration, integrin-mediated adhesion, proliferation, and differentiation. EphA2 is overexpressed in various cancers including breast, prostate, urinary bladder, skin, lung, ovarian, and brain cancers. High EphA2 expression is also correlated with poor prognosis. The monoclonal antibodies DS-8895a opt1, DS-8895 opt2, and Anti-EphA2 of MEDI-547 have been developed to target EphA2.

[0153] RON (macrophage stimulating 1 receptor) encodes a cell surface receptor for macrophage stimulating protein (MSP) with tyrosine kinase activity and belongs to the MET proto-oncogene family. RON has significant structural similarity and sequence homology with the cancer-related gene C-MET. RON plays a significant role in KRAS oncogene addiction and has also been shown to be overexpressed in pancreatic cancers. Altered Ron expression and activation has been associated with decreased survival and cancer progression in various cancers including gastric, colon, breast, bladder, renal cell, ovarian, and hepatocellular cancers. The monoclonal antibody narnatumab has been developed to target RON.

[0154] LY6E (lymphocyte antigen 6 complex, locus E) encodes an interferon alpha-inducible GPI-anchored cell membrane protein. LY6E is overexpressed in numerous cancers including lung, gastric, ovarian, breast, kidney, pancreatic, and head and neck carcinomas. The monoclonal antibody RG7841 has been developed to target LY6E.

[0155] FRA (folate receptor alpha) encodes a GPI-anchored cell surface glycoprotein. FRA binds folic acid, a molecule needed for cell growth and DNA synthesis, and mediates its internalization via receptor-mediated endocytosis. FRA is overexpressed in various cancers including prostate, breast, ovarian, pancreatic, mesothelioma, non-small cell lung carcinoma, and head and neck cancer. FRA expression has also been found to enhance tumor cell proliferation. The monoclonal antibodies farletuzumab and mirvetuximab have been developed to target FRA.

[0156] PSMA (prostate specific membrane antigen) is a type II transmembrane glycoprotein belonging to the M28 peptidase family that is expressed in all types of prostate tissues. PSMA is upregulated in cancer cells within the prostate and is used as a marker for prostate cancer. PSMA expression may also serve as a predictor of disease recurrence in prostate cancer patients. The monoclonal antibodies J591 variant 1 and J591 variant 2 have been developed to target PSMA.

[0157] DLL3 (delta-like 3) encodes a ligand in the Notch signaling pathway that is associated with neuroendocrine cancer. DLL3 is most highly expressed in the fetal brain and is involved in somitogenesis in the paraxial mesoderm. DLL3 is expressed on tumor cell surfaces but not in normal tissues. The monoclonal antibody rovalpituzumab has been developed to target DLL3.

[0158] PTK7 (tyrosine protein kinase-like 7) encodes a receptor tyrosine kinase that lacks catalytic tyrosine kinase activity but is nevertheless capable of signal transduction. PTK7 interacts with the WNT signaling pathway, which itself has important roles in epithelial mesenchymal transition and various cancers such as breast cancer. PTK7 overexpression has been associated with patient prognosis depending on the cancer type. The monoclonal antibodies PF-06647020 and the anti-PTK7 antibody described by SEQ ID NO 440 and 445 have been developed to target PTK7.

[0159] LIV1 (LIV-1 protein, estrogen regulated) encodes a member of the LIV-1 subfamily of ZIP (Zrt-, Irt-like proteins) zinc transporters. LIV1 is an estrogen regulated protein that transports zinc and/or other ions across the cell membrane. Elevated levels of LIV1 have been shown in estrogen receptor positive breast cancers, and LIV1 is used as a marker of ER-positive cancers. LIV1 has also been implicated as a downstream target of the STAT3 transcription factor and as playing an essential role in the nuclear localization of the Snail transcription factor that modulates epithelial-to-mesenchymal transition. The monoclonal antibody Ladiratuzumab has been developed to target LIV1.

[0160] ROR1 (receptor tyrosine kinase-like orphan receptor 1) encodes a member of the ROR family of orphan receptors. ROR1 has been found to bind Wnt5a, a non-canonical Wnt via a Frizzled domain (FZD), and plays an important role in skeletal, cardiorespiratory, and neurological development. ROR1 expression is predominantly restricted to embryonic development and is absent in most mature tissues. In contrast, ROR1 expression is upregulated in B-Cell chronic lymphocytic leukemia, acute lymphocytic leukemia, non-Hodgkin lymphoma, and myeloid malignancies. The monoclonal antibody cirmtuzumab has been developed to target ROR1.

[0161] MAGE-A3 (melanoma-associated antigen 3) encodes a member of the melanoma-associated antigen gene family. The function of MAGE-A3 is not known, but its elevated expression has been observed in various cancers including melanoma, non-small cell lung cancer, and in putative cancer stem cell populations in bladder cancer. The monoclonal antibody described by SEQ ID NO 479 and 484 has been developed to target MAGE-A3.

[0162] NY-ESO-1 (New York esophageal squamous cell carcinoma 1) encodes a member of the cancer-testis family of proteins. Cancer-testis antigen expression is normally restricted to testicular germ cells in adult tissues, but has been found to be aberrantly expressed in various tumors including soft tissue sarcomas, melanoma, epithelial cancers, and myxoid and round cell liposarcomas. The monoclonal antibody described by SEQ ID NO 492 and 497 has been developed to target NY-ESO-1.

[0163] Immune-stimulatory molecular motifs, such as Pathogen-Associated Molecular Pattern molecules (PAMPs), can be recognized by receptors of the innate immune system, such as Toll-like receptors (TLRs), Nod-like receptors, C-type lectins, and RIG-I-like receptors. These receptors can be transmembrane and intra-endosomal proteins which can prime activation of the immune system in response to infectious agents such as pathogens. Similar to other protein families, there are many different TLRs, including TLR4, TLR7 and TLR8. Several agonists targeting activation of different TLRs have been tried in various immunotherapies, including vaccine adjuvants and in cancer immunotherapies. However, therapeutic use of PAMPs and DAMPs or other mechanisms of intervention can be limited because systemic activation of PAMP and DAMP signaling pathways can have life-threatening consequences due to cytokine syndrome-induced or cytokine storm-induced toxic shock syndrome. Accordingly, there is a critical need for therapeutic, clinically relevant targeted delivery of PAMP and DAMP agonists for safe and effective strategies to enhance immune responses.

[0164] The presently described antibody constructs and conjugates can be utilized as strategy to enhance immune responses. A conjugate can comprise an antibody construct and an immune-stimulatory compound. A conjugate can comprise a first binding domain, a second binding domain, and an immune-stimulatory compound. A conjugate can comprise a first binding domain, a second binding domain, an Fc domain, and an immune-stimulatory compound. An antibody construct can comprise a first binding domain, a second binding domain, and a third binding domain. An antibody construct can comprise a first binding domain, a second binding domain, a third binding domain, and an Fc domain, wherein the first binding domain is attached to the Fc domain, wherein the second binding domain is attached to the Fc domain, and wherein the third binding domain is attached to a C-terminal end of a light chain of the first binding domain. A conjugate can comprise a first binding domain, a second binding domain, a third binding domain, and an immune-stimulatory compound. A conjugate can comprise a first binding domain, a second binding domain, a third binding domain, an Fc domain, and an immune-stimulatory compound, wherein the first binding domain is attached to the Fc domain, wherein the second binding domain is attached to the Fc domain, and wherein the third binding domain is attached to a C-terminal end of a light chain of the first binding domain. A conjugate can comprise a first binding domain, a second binding domain, a third binding domain, an Fc domain, and an immune-stimulatory compound, wherein the first binding domain is attached to the Fc domain, wherein the second binding domain is attached to the Fc domain, and wherein the third binding domain is attached to a C-terminal end of a light chain of the first binding domain.

### Binding Domains

[0165] A conjugate or antibody construct can contain one or more binding domains. A conjugate or antibody construct can comprise a first binding domain. A conjugate or antibody construct can comprise a second binding domain. A binding domain can specifically bind to a molecule on a cell surface or a fragment thereof. A binding domain can specifically bind to an antigen on a cell surface, for example, of a tumor cell, of an antigen presenting cell such as a dendritic cell or macrophage or other immune cell cell such as a T cell. In some embodiments, an immune cell is a T cell, B cell, NK cell, or NKT cell. In some embodiments, an immune cell is an antigen presenting cell. In some embodiments, an immune cell is not an antigen presenting cell. A binding domain can specifically bind to a molecule, wherein the molecule comprises an antigen. A binding domain can be a cell surface receptor agonist. A binding domain can be an antigen binding domain. An antigen binding domain can be a cell surface receptor agonist. An antigen binding domain can be a domain that can specifically bind to an antigen. An antigen binding domain can specifically bind to a tumor antigen. An antigen binding domain can be an antigen-binding portion of an antibody or an antibody fragment. An antigen binding domain can be one or more fragments of an antibody that can retain the ability to specifically bind to an antigen. An antigen binding domain can be any antigen binding fragment. An antigen binding domain can recognize a single antigen. A conjugate can comprise, for example, two, three, four, five, six, seven, eight, nine, ten, or more antigen binding domains. A conjugate or antibody construct can comprise two antigen binding domains in which each antigen binding domain can recognize the same antigen. A conjugate or antibody construct can comprise two antigen binding domains in which each antigen binding domain can recognize different antigens. A conjugate or antibody construct can comprise three antigen binding domains in which each antigen binding domain can recognize different antigens. A conjugate or antibody construct can comprise three antigen binding domains in which two of the antigen binding domains can recognize the same antigen. An antigen binding domain can be in a scaffold, in which a scaffold is a supporting framework for the antigen binding domain. An antigen binding domain can be in a non-antibody scaffold. An antigen binding domain can be in an antibody scaffold or antibody-like scaffold. A conjugate or antibody construct can comprise an antigen binding domain in a scaffold. The conjugate or antibody construct can comprise an Fc fusion protein product (also referred to as a fusion peptide). In some embodiments, the antibody construct is a fusion peptide or the antibody construct of a conjugate is a fusion peptide. For example, an antigen binding domain and an Fc domain can be expressed as fusion peptide. Two antigen binding domains and an Fc domain can be expressed as a fusion peptide.

[0166] The conjugates or antibody constructs described herein can comprise a binding domain that can specifically bind to a tumor antigen. A tumor antigen can be a tumor specific antigen and/or a tumor associated antigen. As described herein, a “tumor antigen” can refer to a molecular marker that can be expressed by a neoplastic tumor cell and/or within a tumor microenvironment. The molecular marker can be a cell surface receptor. For example, a tumor associated antigen can be an antigen expressed on a cell associated with a tumor, such as a neoplastic cell, stromal cell, endothelial cell, fibroblast, or tumor-infiltrating immune cell. For example, the tumor associated antigen Her2/Neu can be overexpressed by certain types of breast and ovarian cancer. A tumor antigen can also be ectopically expressed by a tumor and contribute to deregulation of the cell cycle, reduced apoptosis, metastasis, or escape from immune surveillance. Tumor associated antigens can generally be proteins or polypeptides derived therefrom, but can be glycans, lipids, or other small organic molecules. Additionally, a tumor antigen can arise through increases or decreases in post-translational processing exhibited by a cancer cell compared to a normal cell, for example, protein glycosylation, protein lipidation, protein phosphorylation, or protein acetylation.

[0167] In certain embodiments, a binding domain specifically can bind to a tumor associated antigen selected from the following: CD5, CD19, CD20, CD25, CD37, CD30, CD33, CD45, CAMPATH-1, BCMA, CS-1, PD-L1, B7-H3, B7-DC (PD-L2), HLA-DR, carcinoembryonic antigen (CEA), TAG-72, MUC1, MUC15, MUC16, folate-binding protein, A33, G250, prostate-specific membrane antigen (PSMA), ferritin, GD2, GD3, GM2, Ley, CA-125, CA19-9, epidermal growth factor, HER2, IL-2 receptor, EGFRvIII (de2-7 EGFR), EGFR, fibroblast activation protein (FAP), tenascin, a metalloproteinase, endosialin, vascular endothelial growth factor, αvβ3, WT1, LMP2, HPV E6, HPV E7, Her-2/neu, p53 nonmutant, NY-ESO-1, GLP-3, MelanA/MART1, Ras mutant, gp100, p53 mutant, PR1, bcr-abl, tyrosinase, survivin, PSA, hTERT, a Sarcoma translocation breakpoint fusion protein, EphA2, PAP, ML-IAP, AFP, ERG, NA17, PAX3, ALK, androgen receptor, cyclin B1, polysialic acid, MYCN, RhoC, TRP-2, fucosyl GM1, mesothelin (MSLN), PSCA, MAGE A1, MAGE-A3, sLe(animal), CYP1B1, PLAV1, BORIS, Tn, GloboH, ETV6-AML, NY-BR-1, RGS5, SART3, STn, Carbonic anhydrase IX, PAX5, OY-TES1, Sperm protein 17, LCK, MAGE C2, MAGE A4, GAGE, TRAIL1, HMWMAA, AKAP-4, SSX2, XAGE 1, B7H3, Legumain, Tie 3, PAGE4, VEGFR2, MAD-CT-1, PDGFR-B, MAD-CT-2, ROR2, CMET, HER3, EPCAM, CA6, NAPI2B, TROP2, Claudin-6 (CLDN6), Claudin-16 (CLDN16), CLDN18.2, RON, LY6E, FRA, DLL3, PTK7, Uroplakin-1B (UPK1B), LIV1, ROR1, STRA6, TMPRSS3, TMPRSS4, TMEM238, C1orf186, Fos-related antigen 1, VEGFR1, endoglin, PD-L, VTCN1 (B7-H4), VISTA, or a fragment thereof. In certain embodiments, a binding domain specifically binds to a tumor associated antigen comprising Her2/Neu (CD340).

[0168] In certain embodiments, a binding domain specifically can bind to a tumor associated antigen comprising GD2, GD3, GM2, Le^{y}, polysialic acid, fucosyl GM1, GM3, Tn, STn, sLe(animal), or GloboH. In certain embodiments, a binding domain specifically can bind to a tumor associated antigen comprising at least 80%, 90%, 95%, 97%, 98%, 99% or 100% homology to the amino acid sequence of CD5, CD19, CD20, CD25, CD37, CD30, CD33, CD45, CAMPATH-1, BCMA, CS-1, PD-L, B7-H3, B7-DC (PD-L2), HLA-DR, carcinoembryonic antigen (CEA), TAG-72, MUC1, MUC15, MUC16, folate-binding protein, A33, G250, prostate-specific membrane antigen (PSMA), ferritin, CA-125, CA19-9, epidermal growth factor, HER2, IL-2 receptor, EGFRvIII (de2-7 EGFR), EGFR, fibroblast activation protein (FAP), tenascin, a metalloproteinase, endosialin, vascular endothelial growth factor, αvβ3, WT1, LMP2, HPV E6, HPV E7, Her-2/neu, p53 nonmutant, NY-ESO-1, GLP-3, MelanA/MART1, Ras mutant, gp100, p53 mutant, PR1, bcr-abl, tyrosinase, survivin, PSA, hTERT, a Sarcoma translocation breakpoint fusion protein, EphA2, PAP, ML-IAP, AFP, ERG, NA17, PAX3, ALK, androgen receptor, cyclin B1, MYCN, RhoC, TRP-2, mesothelin (MSLN), PSCA, MAGE A1, MAGE-A3, CYP1B1, PLAV1, BORIS, ETV6-AML, NY-BR-1, RGS5, SART3, Carbonic anhydrase IX, PAX5, OY-TES1, Sperm protein 17, LCK, MAGE C2, MAGE A4, GAGE, TRAIL1, HMWMAA, AKAP-4, SSX2, XAGE 1, B7H3, Legumain, Tie 3, PAGE4, VEGFR2, MAD-CT-1, PDGFR-B, MAD-CT-2, ROR2, CMET, HER3, EPCAM, CA6, NAPI2B, TROP2, Claudin-6 (CLDN6), Claudin-16 (CLDN16), CLDN18.2, RON, LY6E, FRA, DLL3, PTK7, Uroplakin-1B (UPK1B), LIV1, ROR1, STRA6, TMPRSS3, TMPRSS4, TMEM238, Clorf186, Fos-related antigen 1, VEGFR1, endoglin, PD-L1, VTCN1 (B7-H4), VISTA, or a fragment thereof. In certain embodiments, a binding domain specifically binds to a tumor associated antigen comprising Her2/Neu (CD340). TABLE 1 below shows some exemplary amino acid sequences of these tumor antigens.

TABLE 1
Exemplary Tumor Antigen Amino Acid Sequences

| | SEQ ID |
|---|---|
| Antigen | NO: |
| HER2 (isoform 1) | 850 |
| HER2 (isoform 2) | 851 |
| HER2 (isoform 3) | 852 |
| HER2 (isoform 4) | 853 |
| HER2 (isoform 5) | 854 |
| HER2 (isoform 6) | 855 |
| EGFR (isoform 1) | 856 |
| EGFR (isoform 2) | 857 |
| EGFR (isoform 3) | 858 |
| EGFR (isoform 4) | 859 |
| CMET (isoform 1) | 860 |
| CMET (isoform 2) | 861 |
| CMET (isoform 3) | 862 |
| HER3 (isoform 1) | 863 |
| HER3 (isoform 2) | 864 |
| HER3 (isoform 3) | 865 |
| HER3 (isoform 4) | 866 |
| HER3 (isoform 5) | 867 |
| MUC1 (isoform 1) | 868 |
| MUC1 (Isoform 2) | 869 |
| MUC1 (Isoform 3) | 870 |
| MUC1 (Isoform 4) | 871 |
| MUC1 (Isoform 5) | 872 |
| MUC1 (Isoform 6) | 873 |
| MUC1 (Isoform Y) | 874 |
| MUC1 (Isoform 8) | 875 |
| MUC1 (Isoform 9) | 876 |
| MUC1 (Isoform F) | 877 |
| MUC1 (Isoform Y- | 878 |
| LSP) | |
| MUC1 (Isoform | 879 |
| S2) | |
| MUC1 (Isoform | 880 |
| M6) | |
| MUC1 (Isoform | 881 |
| ZD) | |
| MUC1 (Isoform | 882 |
| T10) | |
| MUC1 (Isoform | 883 |
| E2) | |
| MUC1 (Isoform | 884 |
| J13) | |
| MUC16 | 885 |
| EPCAM | 886 |
| MSLN (isoform | 887 |
| Q13421-1) | |
| MSLN (isoform 2) | 888 |
| MSLN (isoform 3) | 889 |
| MSLN (isoform 4) | 890 |
| CA6 (isoform 1) | 891 |
| CA6 (isoform 2) | 892 |
| CA6 (isoform 3) | 893 |
| NAPI2B (isoform | 894 |
| 1) | |
| NAPI2B (isoform | 895 |
| 2) | |
| TROP2 | 896 |
| CEA (CEACAM5, | 897 |
| isoform 1) | |
| CEA (CEACAM5, | 898 |
| isoform 2) | |
| CLDN18.2 | 899 |
| (isoform A2) | |
| EGFRvIII | 900 |
| FAP (isoform 1) | 901 |
| FAP (isoform 2) | 902 |
| EphA2 (isoform 1) | 903 |
| EphA2 (isoform 2) | 904 |
| RON (isoform | 905 |
| RON) | |
| RON (isoform | 906 |
| delta) | |
| RON (isoform | 907 |
| RON-1) | |
| RON (isoform | 908 |
| RON-2) | |
| RON (isoform | 909 |
| RON-3) | |
| RON (isoform | 910 |
| RON-4) | |
| LY6E | 911 |
| FRA1 (isoform 1) | 912 |
| FRA1 (isoform 2) | 913 |
| PSMA (isoform 1) | 914 |
| PSMA (isoform | 915 |
| PMSA-3) | |
| PSMA (isoform | 916 |
| PMSA-4) | |
| PSMA (isoform | 917 |
| PMSA′) | |
| PSMA (isoform | 918 |
| PSMA-7) | |
| PSMA (isoform | 919 |
| PSMA-8) | |
| PSMA (isoform | 920 |
| PSMA-9) | |
| PSMA (isoform 10) | 921 |
| DLL3 (isoform 1) | 922 |
| DLL3 (isoform 2) | 923 |
| PTK7 (isoform 1) | 924 |
| PTK7 (isoform 2) | 925 |
| PTK7 (isoform 3) | 926 |
| PTK7 (isoform 4) | 927 |
| PTK7 (isoform 5) | 928 |
| PTK7 (isoform 6) | 929 |
| LIV1 (isoform 1) | 930 |
| LIV1 (isoform 2) | 931 |
| ROR1 (isoform 1) | 932 |
| ROR1 (isoform | 933 |
| short) | |
| ROR1 (isoform 3) | 934 |
| MAGE-A3 | 935 |
| NY-ESO-1 | 936 |
| LRRC15 (isoform | 937 |
| 1) | |
| LRRC15 (isoform | 938 |
| 2) | |
| GLP-3 (GPC3) | 939 |
| (isoform 1) | |
| GLP-3 (GPC3) | 940 |
| (isoform 2) | |
| GLP-3 (GPC3) | 941 |
| (isoform 3) | |
| CLDN6 | 942 |
| CLDN16 | 943 |
| UPK1B | 944 |
| VTCN1 | 945 |
| STRA6 (isoform 1) | 946 |
| STRA6 (isoform 2) | 947 |
| STRA6 (isoform 3) | 948 |
| STRA6 (isoform 4) | 949 |
| STRA6 (isoform 5) | 950 |
| STRA6 (isoform 6 | 951 |
| CD273 (isoform 1) | 952 |
| CD273 (isoform 2) | 953 |
| CD273 (isoform 3) | 954 |
| PD-L1 (isoform 1) | 955 |
| PD-L1 (isoform 2) | 956 |
| PD-L1 (isoform 3) | 957 |
| CD5 | 1030 |
| CD19 (isoform 1) | 1031 |
| CD19 (isoform 2) | 1032 |
| CD20 (isoform 1) | 1033 |
| CD20 (isoform 2) | 1034 |
| CD25 | 1035 |
| CD37 (isoform 1) | 1036 |
| CD37 (isoform 2) | 1037 |
| CD37 (isoform 3) | 1038 |
| CD30 (isoform 1) | 1039 |
| CD30 (isoform 2) | 1040 |
| CD30 (isoform 3) | 1041 |
| CD33 (isoform 1) | 1042 |
| CD33 (isoform 2) | 1043 |
| CD33 (isoform 3) | 1044 |
| CD45 (isoform 1) | 1045 |
| CD45 (isoform 2) | 1046 |
| CAMPTH-1 | 1047 |
| BCMA (isoform 1) | 1048 |
| BCMA (isoform 2) | 1049 |
| CS-1 (isoform 1) | 1050 |
| CS-1 (isoform 2) | 1051 |
| CS-1 (isoform 3) | 1052 |
| B7-H3 (isoform 1) | 1053 |
| B7-H3 (isoform 2) | 1054 |
| B7-H3 (isoform 3) | 1055 |
| B7-H3 (isoform 4) | 1056 |
| B7-DC (isoform 1) | 1057 |
| B7-DC (isoform 2) | 1058 |
| B7-DC (isoform 3) | 1059 |
| HLA-DR (isoform | 1060 |
| 1) | |
| HLA-DR (isoform | 1061 |
| 2) | |
| HLA-DR (isoform | 1062 |
| 3) | |
| MUC15 (isoform | 1063 |
| 1) | |
| MUC15 (isoform | 1064 |
| 2) | |
| Folate-Binding | 1065 |
| Protein | |
| A33 | 1066 |
| G250 | 1067 |
| Ferritin light chain | 1068 |
| Ferritin heavy | 1069 |
| chain | |
| EGF (isoform 1) | 1070 |
| EGF (isoform 2) | 1071 |
| EGF (isoform 3) | 1072 |
| IL-2 Receptor | 1073 |
| (gamma subunit) | |
| (isoform 1) | |
| IL-2 Receptor | 1074 |
| (gamma subunit) | |
| (isoform 2) | |
| IL-2 Receptor | 1075 |
| (alpha subunit) | |
| Tenascin (isoform | 1076 |
| 1) | |
| Tenascin (isoform | 1077 |
| 2) | |
| Tenascin (isoform | 1078 |
| 3) | |
| Tenascin (isoform | 1079 |
| 4) | |
| Tenascin (isoform | 1080 |
| 5) | |
| Tenascin (isoform | 1081 |
| 6) | |
| Endosialin (isoform | 1082 |
| 1) | |
| Endosialin (isoform | 1083 |
| 2) | |
| Vascular | 1084 |
| endothelial growth | |
| factor (isoform | |
| VEGF206) | |
| Vascular | 1085 |
| endothelial growth | |
| factor (isoform | |
| VEGF189) | |
| Vascular | 1086 |
| endothelial growth | |
| factor (isoform | |
| VEGF183) | |
| Vascular | 1087 |
| endothelial growth | |
| factor (isoform | |
| VEGF165) | |
| Vascular | 1088 |
| endothelial growth | |
| factor (isoform | |
| VEGF148) | |
| Vascular | 1089 |
| endothelial growth | |
| factor (isoform | |
| VEGF145) | |
| Vascular | 1090 |
| endothelial growth | |
| factor (isoform | |
| VEGF165B) | |
| Vascular | 1091 |
| endothelial growth | |
| factor (isoform | |
| VEGF121) | |
| Vascular | 1092 |
| endothelial growth | |
| factor (isoform | |
| VEGF111) | |
| Vascular | 1093 |
| endothelial growth | |
| factor (isoform L- | |
| VEGF165) | |
| Vascular | 1094 |
| endothelial growth | |
| factor (isoform L- | |
| VEGF121) | |
| Vascular | 1095 |
| endothelial growth | |
| factor (isoform L- | |
| VEGF189) | |
| Vascular | 1096 |
| endothelial growth | |
| factor (isoform L- | |
| VEGF206) | |
| Vascular | 1097 |
| endothelial growth | |
| factor (isoform 15) | |
| Vascular | 1098 |
| endothelial growth | |
| factor (isoform 16) | |
| Vascular | 1099 |
| endothelial growth | |
| factor (isoform 17) | |
| Vascular | 1100 |
| endothelial growth | |
| factor (isoform 18) | |
| Integrin alpha V | 1101 |
| (isoform 1) | |
| Integrin alpha V | 1102 |
| (isoform 2) | |
| Integrin alpha V | 1103 |
| (isoform 3) | |
| Integrin beta 3 | 1104 |
| (isoform Beta-3A) | |
| Integrin beta 3 | 1105 |
| (isoform Beta-3B) | |
| Integrin beta 3 | 1106 |
| (isoform Beta-3C) | |
| WT1 (isoform 1) | 1107 |
| WT1 (isoform 2) | 1108 |
| WT1 (isoform 3) | 1109 |
| WT1 (isoform 4) | 1110 |
| WT1 (isoform 6) | 1111 |
| WT1 (isoform 7) | 1112 |
| WT1 (isoform 8) | 1113 |
| WT1 (isoform 9) | 1114 |
| LMP2 (isoform | 1115 |
| LMP2.L) | |
| LMP2 (isoform | 1116 |
| LMP2.S) | |
| HPV E6 (strain 16) | 1117 |
| HPV E6 (strain 18) | 1118 |
| HPV E7 (strain 16) | 1119 |
| HPV E7 (strain 18) | 1120 |
| P53 nonmutant | 1121 |
| (isoform 1) | |
| P53 nonmutant | 1122 |
| (isoform 2) | |
| P53 nonmutant | 1123 |
| (isoform 3) | |
| P53 nonmutant | 1124 |
| (isoform 4) | |
| P53 nonmutant | 1125 |
| (isoform 5) | |
| P53 nonmutant | 1126 |
| (isoform 6) | |
| P53 nonmutant | 1127 |
| (isoform 7) | |
| P53 nonmutant | 1128 |
| (isoform 8) | |
| P53 nonmutant | 1129 |
| (isoform 9) | |
| MalenA/MART1 | 1130 |
| Gp100 (isoform 1) | 1131 |
| Gp100 (isoform 2) | 1132 |
| Gp100 (isoform 3) | 1133 |
| Gp100 (isoform 4) | 1134 |
| Gp100 (isoform 5) | 1135 |
| PR1 (TMEM37) | 1136 |
| BCR-abl (isofrom | 1137 |
| X3) | |
| BCR-abl (isofrom | 1138 |
| Y5) | |
| BCR-abl (isofrom | 1139 |
| X9) | |
| BCR-abl (isofrom | 1140 |
| X2) | |
| BCR-abl (isofrom | 1141 |
| e8a2 variant) | |
| BCR-abl (isofrom | 1142 |
| Y3) | |
| BCR-abl (isofrom | 1143 |
| Y2) | |
| BCR-abl (isofrom | 1144 |
| Y1) | |
| BCR-abl (isofrom | 1145 |
| X6) | |
| BCR-abl (isofrom | 1146 |
| Y4) | |
| BCR-abl (isofrom | 1147 |
| Y6) | |
| Tyrosinase | 1148 |
| (isoform 1) | |
| Tyrosinase | 1149 |
| (isoform 2) | |
| Survivin (isoform | 1150 |
| 1) | |
| Survivin (isoform | 1151 |
| 2) | |
| Survivin (isoform | 1152 |
| 3) | |
| Survivin (isoform | 1153 |
| 4) | |
| Survivin (isoform | 1154 |
| 5) | |
| Survivin (isoform | 1155 |
| 6) | |
| Survivin (isoform | 1156 |
| 7) | |
| PSA (isoform 1) | 1157 |
| PSA (isoform 2) | 1158 |
| PSA (isoform 3) | 1159 |
| PSA (isoform 4) | 1160 |
| PSA (isoform 5) | 1161 |
| hTERT (isoform 1) | 1162 |
| hTERT (isoform 2) | 1163 |
| hTERT (isoform 3) | 1164 |
| hTERT (isoform 4) | 1165 |
| Sarcoma | 1166 |
| translocation | |
| breakpoint fusion | |
| protein (Ewing | |
| sarcome breakpoint | |
| region 1 protein) | |
| (isoform EWS) | |
| Sarcoma | 1167 |
| translocation | |
| breakpoint fusion | |
| protein (Ewing | |
| sarcome breakpoint | |
| region 1 protein) | |
| (isoform EWS-B) | |
| Sarcoma | 1168 |
| translocation | |
| breakpoint fusion | |
| protein (Ewing | |
| sarcome breakpoint | |
| region 1 protein) | |
| (isoform 3) | |
| Sarcoma | 1169 |
| translocation | |
| breakpoint fusion | |
| protein (Ewing | |
| sarcome breakpoint | |
| region 1 protein) | |
| (isoform 4) | |
| Sarcoma | 1170 |
| translocation | |
| breakpoint fusion | |
| protein (Ewing | |
| sarcome breakpoint | |
| region 1 protein) | |
| (isoform 5) | |
| Sarcoma | 1171 |
| translocation | |
| breakpoint fusion | |
| protein (Ewing | |
| sarcome breakpoint | |
| region 1 protein) | |
| (isoform 6) | |
| PAP (isoform 1) | 1172 |
| PAP (isoform 2) | 1173 |
| PAP (isoform 3) | 1174 |
| ML-IAP (isoform | 1175 |
| 2) | |
| ML-IAP (isoform | 1176 |
| 1) | |
| AFP | 1177 |
| ERG (isoform | 1178 |
| ERG-3) | |
| ERG (isoform | 1179 |
| ERG-2) | |
| ERG (isoform | 1180 |
| ERG-1) | |
| ERG (isoform 5) | 1181 |
| ERG (isoform 7) | 1182 |
| ERG (isoform 8) | 1183 |
| NA17 | 1184 |
| PAX3 (isoform | 1185 |
| Pax3) | |
| PAX3 (isoform | 1186 |
| Pax3A) | |
| PAX3 (isoform | 1187 |
| Pax3B) | |
| PAX3 (isoform | 1188 |
| Pax3G) | |
| PAX3 (isoform | 1189 |
| Pax3H) | |
| PAX3 (isoform 6) | 1190 |
| PAX3 (isoform 7) | 1191 |
| PAX3 (isoform | 1192 |
| Pax3E) | |
| ALK | 1193 |
| Androgen receptor | 1194 |
| (isoform 1) | |
| Androgen receptor | 1195 |
| (isoform 2) | |
| Androgen receptor | 1196 |
| (isoform 3) | |
| Androgen receptor | 1197 |
| (isoform 4) | |
| Cyclin B1 (isoform | 1198 |
| 1) | |
| Cyclin B1 (isoform | 1199 |
| 2) | |
| MYCN | 1200 |
| RhoC | 1201 |
| TRP-2 | 1202 |
| TRP-2 | 1203 |
| TRP-2 | 1204 |
| PSCA | 1205 |
| MAGE A1 | 1206 |
| CYP1B1 | 1207 |
| BORIS (isoform 1) | 1208 |
| BORIS (isoform 2) | 1209 |
| BORIS (isoform 3) | 1210 |
| BORIS (isoform 4) | 1211 |
| BORIS (isoform 5) | 1212 |
| BORIS (isoform 6) | 1213 |
| BORIS (isoform 7) | 1214 |
| BORIS (isoform 8) | 1215 |
| BORIS (isoform 9) | 1216 |
| BORIS (isoform | 1217 |
| 10) | |
| BORIS (isoform | 1218 |
| 11) | |
| ETV6-AML | 1219 |
| NY-BR-1 | 1220 |
| RGS5 (isoform 1) | 1221 |
| RGS5 (isoform 2) | 1222 |
| RGS5 (isoform 3) | 1223 |
| SART3 (isoform 1) | 1224 |
| SART3 (isoform 2) | 1225 |
| SART3 (isoform 3) | 1226 |
| SART3 (isoform 4) | 1227 |
| Carbonic anhydrase | 1228 |
| IX | |
| PAX5 (isoform 1) | 1229 |
| PAX5 (isoform 2) | 1230 |
| PAX5 (isoform 3) | 1231 |
| PAX5 (isoform 4) | 1232 |
| PAX5 (isoform 5) | 1233 |
| PAX5 (isoform 6) | 1234 |
| PAX5 (isoform 7) | 1235 |
| PAX5 (isoform 8) | 1236 |
| PAX5 (isoform 9) | 1237 |
| PAX5 (isoform 10) | 1238 |
| PAX5 (isoform 11) | 1239 |
| OY-TES1 | 1240 |
| Sperm protein 17 | 1241 |
| LCK (isoform | 1242 |
| long) | |
| LCK (isoform | 1243 |
| short) | |
| LCK (isoform 3) | 1244 |
| HMWMAA | 1245 |
| AKAP-4 (isoform | 1246 |
| 1) | |
| AKAP-4 (isoform | 1247 |
| 2) | |
| SSX2 (isoform 1) | 1248 |
| SSX2 (isoform 2) | 1249 |
| XAGE 1 (isoform | 1250 |
| B) | |
| XAGE 1 (isoform | 1251 |
| D) | |
| Legumain (isoform | 1252 |
| 1) | |
| Legumain (isoform | 1253 |
| 2) | |
| Legumain (isoform | 1254 |
| 3) | |
| VEGFR2 (isoform | 1255 |
| 1) | |
| VEGFR2 (isoform | 1256 |
| 2) | |
| VEGFR2 (isoform | 1257 |
| 3) | |
| MAD-CT-1 | 1258 |
| (isoform 1) | |
| MAD-CT-1 | 1259 |
| (isoform 2) | |
| PDGFR-B (isoform | 1260 |
| 1) | |
| PDGFR-B (isoform | 1261 |
| 2) | |
| ROR2 | 1262 |
| TMPRSS3 | 1263 |
| (isoform A) | |
| TMPRSS3 | 1264 |
| (isoform B) | |
| TMPRSS3 | 1265 |
| (isoform D) | |
| TMPRSS3 | 1266 |
| (isoform T) | |
| TMPRSS3 | 1267 |
| (isoform E) | |
| TMPRSS3 | 1268 |
| (isoform 6) | |
| TMPRSS4 | 1269 |
| (isoform 1) | |
| TMPRSS4 | 1270 |
| (isoform 2) | |
| TMPRSS4 | 1271 |
| (isoform 3) | |
| TMPRSS4 | 1272 |
| (isoform 4) | |
| TMEM238 | 1273 |
| C1ORF186 | 1274 |
| Fos-related antigen | 1275 |
| 1 (isoform 1) | |
| Fos-related antigen | 1276 |
| 1 (isoform 2) | |
| VEGFR1 (isoform | 1277 |
| 1) | |
| VEGFR1 (isoform | 1278 |
| 2) | |
| VEGFR1 (isoform | 1279 |
| 3) | |
| VEGFR1 (isoform | 1280 |
| 4) | |
| VEGFR1 (isoform | 1281 |
| 5) | |
| VEGFR1 (isoform | 1282 |
| 6) | |
| VEGFR1 (isoform | 1283 |
| 7) | |
| VEGFR1 (isoform | 1284 |
| 8) | |
| Endoglin (isoform | 1285 |
| long) | |
| Endoglin (isoform | 1286 |
| short) | |
| VISTA | 1287 |
| MAGE C2 | 1288 |
| MAGE A4 | 1289 |
| GAGE 2B/C | 1290 |
| GAGE 7 | 1291 |
| GAGE 12B/C/D/E | 1292 |
| GAGE 2D | 1293 |
| GAGE 1 | 1294 |
| GAGE 5 | 1295 |
| GAGE 12I | 1296 |
| GAGE 12F | 1297 |
| GAGE 13 | 1298 |
| GAGE 12J | 1299 |
| GAGE 2A | 1300 |
| GAGE 6 | 1301 |
| GAGE 10 | 1302 |
| GAGE 4 | 1303 |
| GAGE 12G | 1304 |
| GAGE 12H | 1305 |
| GAGE 2E | 1306 |
| TRAIL1 (isoform | 1307 |
| long) | |
| TRAIL (isoform 3) | 1308 |
| TRAIL (isoform | 1309 |
| short) | |
| PAGE4 | 1310 |

[0169] In some embodiments, an amino acid sequence of the tumor antigen has at least 80% sequence identity with the amino acid sequence of a tumor antigen selected from the group consisting of HER2, IL-2 receptor, EGFRvIII (de2-7 EGFR), EGFR, fibroblast activation protein (FAP), tenascin, a metalloproteinase, endosialin, vascular endothelial growth factor, αvβ3, WT1, LMP2, HPV E6, HPV E7, Her-2/neu, p53 nonmutant, NY-ESO-1, GLP-3, MelanA/MART1, Ras mutant, gp100, p53 mutant, PR1, bcr-abl, tyrosinase, survivin, PSA, hTERT, a Sarcoma translocation breakpoint fusion protein, EphA2, PAP, ML-IAP, AFP, ERG, NA17, PAX3, ALK, androgen receptor, cyclin B1, MYCN, RhoC, TRP-2, mesothelin (MSLN), PSCA, MAGE A1, MAGE-A3, CYP1B1, PLAV1, BORIS, ETV6-AML, NY-BR-1, RGS5, SART3, Carbonic anhydrase IX, PAX5, OY-TES1, Sperm protein 17, LCK, MAGE C2, MAGE A4, GAGE, TRAIL1, HMWMAA, AKAP-4, SSX2, XAGE 1, B7H3, Legumain, Tie 3, PAGE4, VEGFR2, MAD-CT-1, PDGFR-B, MAD-CT-2, ROR2, CMET, HER3, EPCAM, CA6, NAPI2B, TROP2, Claudin-6 (CLDN6), Claudin-16 (CLDN16), CLDN18.2, RON, LY6E, FRA, DLL3, PTK7, Uroplakin-1B (UPK1B), LIV1, ROR1, STRA6, TMPRSS3, TMPRSS4, TMEM238, C1orf186, Fos-related antigen 1, VEGFR1, endoglin, PD-L1, VTCN1 (B7-H4), VISTA, or a fragment thereof, and a fragment thereof. In some embodiments, an amino acid sequence of the tumor antigen has at least 80% sequence identity with the amino acid sequence of a tumor antigen selected from TABLE 1.

[0170] In some embodiments, an amino acid sequence of the tumor antigen has at least 80% sequence identity with the amino acid sequence of a tumor antigen selected from the group consisting of HER2, EGFR, CMET, HER3, MUC1, MUC16, EPCAM, MSLN, CA6, NAPI2B, TROP2, CEA, CLDN18.2, EGFRvIII, FAP, EphA2, RON, LY6E, FRA, PSMA, DLL3, PTK7, LIV1, ROR1, MAGE-A3, NY-ESO-1, Endoglin, CD204, CD206, CD301, VTCN1, VISTA, GLP-3, CLDN6, CLDN16, UPK1B, STRA6, TMPRSS3, TMPRSS4, TMEM238, C1orf186, and LRRC15, but not HER2 when the second binding domain specifically binds to CD40.

[0171] A binding domain of a conjugate or antibody construct can be selected from any domain that binds to an antigen including, but not limited to, from a monoclonal antibody, a polyclonal antibody, a recombinant antibody, or a functional fragment thereof, for example, a heavy chain variable domain (VH) and a light chain variable domain (VL), or from a non-antibody scaffold, such as a DARPin, an affimer, an avimer, a knottin, a monobody, lipocalin, an anticalin, ‘T-body’, an affibody, a peptibody, an affinity clamp, an ectodomain, a receptor ectodomain, a receptor, a cytokine, a ligand, an immunocytokine, a centryin, a T-cell receptor, or a recombinant T-cell receptor. The antigen binding domain of a conjugate or antibody construct can be at least 80%, at least 85%, at least 90%, at least 95%, or at least 99% homologous to an antigen binding domain selected from, but not limited to, a monoclonal antibody, a polyclonal antibody, a recombinant antibody, or a functional fragment thereof, for example, a heavy chain variable domain (VH) and a light chain variable domain (VL), or a DARPin, an affimer, an avimer, a knottin, a monobody, a lipocalin, an anticalin, ‘T-body’, an affibody, a peptibody, an affinity clamp, an ectodomain, a receptor ectodomain, a receptor, a cytokine, a ligand, an immunocytokine, a centryin, a T-cell receptor, or a recombinant T-cell receptor.

[0172] A binding domain of a conjugate or antibody construct, for example an antigen binding domain from a monoclonal antibody, can comprise a light chain and a heavy chain. In one aspect, the monoclonal antibody binds to an antigen present on the surface of an immune cell (immune cell antigen) and comprises the light chain of an anti-immune cell antigen antibody and the heavy chain of an anti-immune cell antigen antibody, which bind to an immune cell antigen. In another aspect, the monoclonal antibody binds to an antigen present on the surface of an antigen presenting cell (APC antigen) and comprises the light chain of an anti-APC antigen antibody and the heavy chain of an anti-APC antigen antibody, which bind to an APC antigen. In another aspect, the monoclonal antibody binds to CD40 and comprises the light chain of an anti-CD40 antibody and the heavy chain of an anti-CD40 antibody, which bind to a CD40 antigen. In another aspect, the monoclonal antibody binds to a tumor antigen comprises the light chain of a tumor antigen antibody and the heavy chain of a tumor antigen antibody, which bind to the tumor antigen.

[0173] A conjugate or antibody construct can comprise an antibody. An antibody molecule can consist of two identical light protein chains (light chains) and two identical heavy protein chains (heavy chains), all held together covalently by precisely located disulfide linkages. The N-terminal regions of the light and heavy chains together can form the antigen recognition site of each antibody. Structurally, various functions of an antibody can be confined to discrete protein domains (i.e., regions). The sites that can recognize and can bind to antigen consist of three complementarity determining regions (CDRs) that can lie within the variable heavy chain regions and variable light chain regions at the N-terminal ends of the two heavy and two light chains. The constant domains can provide the general framework of the antibody and may not be involved directly in binding the antibody to an antigen, but can be involved in various effector functions, such as participation of the antibody in antibody-dependent cellular cytotoxicity (ADCC).

[0174] The domains of natural light chain variable regions and heavy chain variable regions can have the same general structures, and each domain can comprise four framework regions, whose sequences can be somewhat conserved, connected by three hyper-variable regions or CDRs. The four framework regions can largely adopt a β-sheet conformation and the CDRs can form loops connecting, and in some aspects forming part of, the β-sheet structure. The CDRs in each chain can be held in close proximity by the framework regions and, with the CDRs from the other chain, can contribute to the formation of the antigen binding site.

[0175] An antibody of a conjugate or antibody construct can comprise an antibody of any type, which can be assigned to different classes of immunoglobins, e.g., IgA, IgD, IgE, IgG, and IgM. Several different classes can be further divided into isotypes, e.g., IgG1, IgG2, IgG3, IgG4, IgA1, and IgA2. An antibody can further comprise a light chain and a heavy chain, often more than one chain. The heavy-chain constant regions (Fc) that corresponds to the different classes of immunoglobulins can be α, δ, ε, γ, and μ, respectively. The light chains can be one of either kappa or κ and lambda or λ, based on the amino acid sequences of the constant domains. The Fc region can comprise an Fc domain. An Fc receptor can bind to an Fc domain. A conjugate can also comprise any fragment or recombinant form thereof, including but not limited to an scFv, Fab, variable Fc fragment, domain antibody, and any other fragment thereof that can specifically bind to an antigen.

[0176] An antibody can comprise an antigen binding domain which can refer to a portion of an antibody comprising the antigen recognition portion, i.e., an antigenic determining variable region of an antibody sufficient to confer recognition and binding of the antigen recognition portion to a target, such as an antigen, i.e., the epitope. Examples of antibody binding domains can include, but are not limited to, Fab, variable Fv fragment and other fragments, combinations of fragments or types of fragments known or knowable to one of ordinary skill in the art.

[0177] A conjugate or antibody construct can comprise an antigen binding domain of an antibody. An antigen binding domain of an antibody can comprise one or more light chain (LC) CDRs (LCDRs) and one or more heavy chain (HC) CDRs (HCDRs), one or more LCDRs or one or more HCDRs. For example, an antibody binding domain of an antibody can comprise one or more of the following: a light chain complementary determining region 1 (LCDR1), a light chain complementary determining region 2 (LCDR2), or a light chain complementary determining region 3 (LCDR3). For another example, an antibody binding domain can comprise one or more of the following: a heavy chain complementary determining region 1 (HCDR1), a heavy chain complementary determining region 2 (HCDR2), or a heavy chain complementary determining region 3 (HCDR3). In some embodiments an antibody binding domain comprises all of the following: a light chain complementary determining region 1 (LCDR1), a light chain complementary determining region 2 (LCDR2), a light chain complementary determining region 3 (LCDR3), a heavy chain complementary determining region 1 (HCDR1), a heavy chain complementary determining region 2 (HCDR2), and a heavy chain complementary determining region 3 (HCDR3). Unless stated otherwise, the CDRs described herein can be defined according to the IMGT (the international ImMunoGeneTics information system). An antigen binding domain can comprise only the heavy chain of an antibody (e.g., does not include any other portion of the antibody). An antigen binding domain can comprise only the variable domain of the heavy chain of an antibody. Alternatively, an antigen binding domain can comprise only the light chain of an antibody. An antigen binding domain can comprise only the variable light chain of an antibody.

[0178] A conjugate or antibody construct can comprise an antibody fragment. An antibody fragment can include (i) a Fab fragment, a monovalent fragment consisting of the VL, VH, CL and CH1 domains; (ii) a F(ab′)₂ fragment, a bivalent fragment comprising two Fab fragments linked by a disulfide bridge at the hinge region; and (iii) a Fv fragment consisting of the VL and VH domains of a single arm of an antibody. Although the two domains of the Fv fragment, VL and VH, can be coded for by separate genes, they can be linked by a synthetic linker to be made as a single protein chain in which the VL and VH regions pair to form monovalent molecules.

[0179] F(ab′)₂ and Fab′ moieties can be produced, for example, recombinantly or by treating immunoglobulin (monoclonal antibody) with a protease such as pepsin and papain, and can include an antibody fragment generated by digesting immunoglobulin near the disulfide bonds existing between the hinge regions in each of the two H chains. The Fab fragment can also contain the constant domain of the light chain and the first constant domain (CH1) of the heavy chain. Fab′ fragments can differ from Fab fragments by the addition of a few residues at the carboxyl terminus of the heavy chain CH1 domain including one or more cysteine(s) from the antibody hinge region.

[0180] An Fv can be the minimum antibody fragment which contains a complete antigen-recognition and antigen-binding site. This region can consist of a dimer of one heavy chain and one light chain variable domain in tight, non-covalent association. In this configuration, the three CDRs of each variable domain can interact to define an antigen-binding site on the surface of the VH-VL dimer. A single variable domain (or half of an Fv comprising only three CDRs specific for an antigen) can recognize and bind to antigen, although at a lower affinity than the entire binding site.

[0181] An antibody used herein can be “humanized.” Humanized forms of non-human (e.g., murine) antibodies can be chimeric immunoglobulins, immunoglobulin chains or fragments thereof (such as Fv, Fab, Fab′, F(ab′)₂ or other target-binding subdomains of antibodies), which can contain minimal sequences derived from non-human immunoglobulin. In general, the humanized antibody can comprise substantially all of at least one, and typically two, variable domains, in which all or substantially all of the CDR regions correspond to those of a non-human immunoglobulin and all or substantially all of the framework (FR) regions are those of a human immunoglobulin sequence. The humanized antibody can also comprise at least a portion of an immunoglobulin constant region (Fc), typically that of a human immunoglobulin consensus sequence.

[0182] An antibody described herein can be a human antibody. As used herein, “human antibodies” can include antibodies having, for example, the amino acid sequence of a human immunoglobulin and include antibodies isolated from human immunoglobulin libraries or from animals transgenic for one or more human immunoglobulins that do not express endogenous immunoglobulins. Human antibodies can be produced using transgenic mice which are incapable of expressing functional endogenous immunoglobulins, but which can express human immunoglobulin genes. Completely human antibodies that recognize a selected epitope can be generated using guided selection. In this approach, a selected non-human monoclonal antibody, e.g., a mouse antibody, is used to guide the selection of a completely human antibody recognizing the same epitope

[0183] An antibody described herein can be a bispecific antibody or a dual variable domain antibody (DVD). Bispecific and DVD antibodies are monoclonal, often human or humanized, antibodies that have binding specificities for at least two different antigens.

[0184] An antibody described herein can be a derivatized antibody. For example, derivatized antibodies can be modified by glycosylation, acetylation, pegylation, phosphorylation, amidation, derivatization by known protecting/blocking groups, proteolytic cleavage, or the like.

[0185] An antibody described herein can have a sequence that has been modified to alter at least one constant region-mediated biological effector function relative to the corresponding wild type sequence. For example, in some embodiments, the antibody can be modified to reduce at least one constant region-mediated biological effector function relative to an unmodified antibody, e.g., reduced or increased binding to an Fc receptor (FcR). FcR binding can be reduced or increased by, for example, mutating the immunoglobulin constant region segment of the antibody at particular regions necessary for FcR interactions.

[0186] An antibody described herein can be modified to acquire or improve at least one constant region-mediated biological effector function relative to an unmodified antibody, e.g., to enhance FcγR interactions. For example, an antibody with a constant region that binds FcγRIIA, FcγRIIB and/or FcγRIIIA with greater affinity than the corresponding wild type constant region can be produced according to the methods described herein.

[0187] An antibody described herein can bind to tumor cells, such as an antibody against a cell surface receptor or a tumor antigen.

[0188] A conjugate or antibody construct can comprise a first binding domain. A conjugate or antibody construct can comprise a first binding domain that specifically binds to an antigen. A conjugate or antibody construct can comprise a first binding domain that specifically binds to a tumor antigen. A first binding domain can specifically bind to a tumor antigen, wherein the tumor antigen has an amino acid sequence that comprises at least 80% homology to an amino acid sequence of an antigen selected from the group consisting of HER2, EGFR, CMET, HER3, MUC1, MUC16, EPCAM, MSLN, CA6, NAPI2B, TROP2, CEA, CLDN18.2, EGFRvIII, FAP, EphA2, RON, LY6E, FRA, PSMA, DLL3, PTK7, LIV1, ROR1, MAGE-A3, NY-ESO-1, and a fragment thereof. A first binding domain can specifically bind to a tumor antigen, wherein the tumor antigen has an amino acid sequence that comprises at least 80% homology to an amino acid sequence of an antigen selected from the group consisting of EGFR, CMET, HER3, MUC1, MUC16, EPCAM, MSLN, CA6, NAPI2B, TROP2, CEA, CLDN18.2, EGFRvIII, FAP, EphA2, RON, LY6E, FRA, PSMA, DLL3, PTK7, LIV1, ROR1, MAGE-A3, NY-ESO-1, LRRC15, GLP-3, CLDN6, CLDN16, UPK1B, VTCN1 (B7-H4) and STRA6 and a fragment thereof. A first binding domain can specifically bind to a tumor antigen, wherein the tumor antigen has an amino acid sequence that comprises at least 80% homology to an amino acid sequence of an antigen selected from the group consisting of HER2, EGFR, CMET, HER3, MUC1, MUC16, EPCAM, MSLN, CA6, NAPI2B, TROP2, CEA, CLDN18.2, EGFRvIII, FAP, EphA2, RON, LY6E, FRA, PSMA, DLL3, PTK7, LIV1, ROR1, MAGE-A3, NY-ESO-1, LRRC15, GLP-3, CLDN6, CLDN16, UPK1B, VTCN1 (B7-H4) and STRA6 and a fragment thereof. A conjugate can comprise a first binding domain that specifically binds to a tumor antigen on a tumor cell, to an immune cell such as an antigen presenting cell, to an immune cell other than an antigen presenting cell or to an antigen presenting cell.

[0189] A conjugate or antibody construct can comprise a first binding domain that specifically binds to a tumor antigen. A conjugate or antibody construct can comprise a first binding domain comprising one or more CDRs. A first binding domain can comprise at least 80% sequence identity to any sequence in TABLE 3. A first binding domain can comprise at least 80% sequence identity to any sequence in TABLE 3 or TABLE 4. A conjugate can comprise a first binding domain that binds to a tumor antigen, wherein the first binding domain comprises at least 80% sequence identity to: a) HCDR1 comprising an amino acid sequence of SEQ ID NO: 13, HCDR2 comprising an amino acid sequence of SEQ ID NO: 14, HCDR3 comprising an amino acid sequence of SEQ ID NO: 15, LCDR1 comprising an amino acid sequence of SEQ ID NO: 18, LCDR2 comprising an amino acid sequence of SEQ ID NO: 19, and LCDR3 comprising an amino acid sequence of SEQ ID NO: 20; b) HCDR1 comprising an amino acid sequence of SEQ ID NO: 26, HCDR2 comprising an amino acid sequence of SEQ ID NO: 27, HCDR3 comprising an amino acid sequence of SEQ ID NO: 28, LCDR1 comprising an amino acid sequence of SEQ ID NO: 31, LCDR2 comprising an amino acid sequence of SEQ ID NO: 32, and LCDR3 comprising an amino acid sequence of SEQ ID NO: 33; c) HCDR1 comprising an amino acid sequence of SEQ ID NO: 39, HCDR2 comprising an amino acid sequence of SEQ ID NO: 40, HCDR3 comprising an amino acid sequence of SEQ ID NO: 41, LCDR1 comprising an amino acid sequence of SEQ ID NO: 44, LCDR2 comprising an amino acid sequence of SEQ ID NO: 45, and LCDR3 comprising an amino acid sequence of SEQ ID NO: 46; d) HCDR1 comprising an amino acid sequence of SEQ ID NO: 52, HCDR2 comprising an amino acid sequence of SEQ ID NO: 53, HCDR3 comprising an amino acid sequence of SEQ ID NO: 54, LCDR1 comprising an amino acid sequence of SEQ ID NO: 57, LCDR2 comprising an amino acid sequence of SEQ ID NO: 58, and LCDR3 comprising an amino acid sequence of SEQ ID NO: 59; e) HCDR1 comprising an amino acid sequence of SEQ ID NO: 65, HCDR2 comprising an amino acid sequence of SEQ ID NO: 66, HCDR3 comprising an amino acid sequence of SEQ ID NO: 67, LCDR1 comprising an amino acid sequence of SEQ ID NO: 70, LCDR2 comprising an amino acid sequence of SEQ ID NO: 71, and LCDR3 comprising an amino acid sequence of SEQ ID NO: 72; f) HCDR1 comprising an amino acid sequence of SEQ ID NO: 78, HCDR2 comprising an amino acid sequence of SEQ ID NO: 79, HCDR3 comprising an amino acid sequence of SEQ ID NO: 80, LCDR1 comprising an amino acid sequence of SEQ ID NO: 83, LCDR2 comprising an amino acid sequence of SEQ ID NO: 84, and LCDR3 comprising an amino acid sequence of SEQ ID NO: 85; g) HCDR1 comprising an amino acid sequence of SEQ ID NO: 91, HCDR2 comprising an amino acid sequence of SEQ ID NO: 92, HCDR3 comprising an amino acid sequence of SEQ ID NO: 93, LCDR1 comprising an amino acid sequence of SEQ ID NO: 96, LCDR2 comprising an amino acid sequence of SEQ ID NO: 97, and LCDR3 comprising an amino acid sequence of SEQ ID NO: 98; h) HCDR1 comprising an amino acid sequence of SEQ ID NO: 104, HCDR2 comprising an amino acid sequence of SEQ ID NO: 105, HCDR3 comprising an amino acid sequence of SEQ ID NO: 106, LCDR1 comprising an amino acid sequence of SEQ ID NO: 109, LCDR2 comprising an amino acid sequence of SEQ ID NO: 110, and LCDR3 comprising an amino acid sequence of SEQ ID NO: 111; i) HCDR1 comprising an amino acid sequence of SEQ ID NO: 117, HCDR2 comprising an amino acid sequence of SEQ ID NO: 118, HCDR3 comprising an amino acid sequence of SEQ ID NO: 119, LCDR1 comprising an amino acid sequence of SEQ ID NO: 122, LCDR2 comprising an amino acid sequence of SEQ ID NO: 123, and LCDR3 comprising an amino acid sequence of SEQ ID NO: 124; j) HCDR1 comprising an amino acid sequence of SEQ ID NO: 130, HCDR2 comprising an amino acid sequence of SEQ ID NO: 131, HCDR3 comprising an amino acid sequence of SEQ ID NO: 132, LCDR1 comprising an amino acid sequence of SEQ ID NO: 135, LCDR2 comprising an amino acid sequence of SEQ ID NO: 136, and LCDR3 comprising an amino acid sequence of SEQ ID NO: 137; k) HCDR1 comprising an amino acid sequence of SEQ ID NO: 143, HCDR2 comprising an amino acid sequence of SEQ ID NO: 144, HCDR3 comprising an amino acid sequence of SEQ ID NO: 145, LCDR1 comprising an amino acid sequence of SEQ ID NO: 148, LCDR2 comprising an amino acid sequence of SEQ ID NO: 149, and LCDR3 comprising an amino acid sequence of SEQ ID NO: 150; 1) HCDR1 comprising an amino acid sequence of SEQ ID NO: 156, HCDR2 comprising an amino acid sequence of SEQ ID NO: 157, HCDR3 comprising an amino acid sequence of SEQ ID NO: 158, LCDR1 comprising an amino acid sequence of SEQ ID NO: 161, LCDR2 comprising an amino acid sequence of SEQ ID NO: 162, and LCDR3 comprising an amino acid sequence of SEQ ID NO: 163; m) HCDR1 comprising an amino acid sequence of SEQ ID NO: 169, HCDR2 comprising an amino acid sequence of SEQ ID NO: 170, HCDR3 comprising an amino acid sequence of SEQ ID NO: 171, LCDR1 comprising an amino acid sequence of SEQ ID NO: 174, LCDR2 comprising an amino acid sequence of SEQ ID NO: 175, and LCDR3 comprising an amino acid sequence of SEQ ID NO: 176; n) HCDR1 comprising an amino acid sequence of SEQ ID NO: 182, HCDR2 comprising an amino acid sequence of SEQ ID NO: 183, HCDR3 comprising an amino acid sequence of SEQ ID NO: 184, LCDR1 comprising an amino acid sequence of SEQ ID NO: 187, LCDR2 comprising an amino acid sequence of SEQ ID NO: 188, and LCDR3 comprising an amino acid sequence of SEQ ID NO: 189; o) HCDR1 comprising an amino acid sequence of SEQ ID NO: 195, HCDR2 comprising an amino acid sequence of SEQ ID NO: 196, HCDR3 comprising an amino acid sequence of SEQ ID NO: 197, LCDR1 comprising an amino acid sequence of SEQ ID NO: 200, LCDR2 comprising an amino acid sequence of SEQ ID NO: 201, and LCDR3 comprising an amino acid sequence of SEQ ID NO: 202; p) HCDR1 comprising an amino acid sequence of SEQ ID NO: 208, HCDR2 comprising an amino acid sequence of SEQ ID NO: 209, HCDR3 comprising an amino acid sequence of SEQ ID NO: 210, LCDR1 comprising an amino acid sequence of SEQ ID NO: 213, LCDR2 comprising an amino acid sequence of SEQ ID NO: 214, and LCDR3 comprising an amino acid sequence of SEQ ID NO: 215; q) HCDR1 comprising an amino acid sequence of SEQ ID NO: 805, HCDR2 comprising an amino acid sequence of SEQ ID NO: 806, HCDR3 comprising an amino acid sequence of SEQ ID NO: 807, LCDR1 comprising an amino acid sequence of SEQ ID NO: 808, LCDR2 comprising an amino acid sequence of SEQ ID NO: 809, and LCDR3 comprising an amino acid sequence of SEQ ID NO: 810; r) HCDR1 comprising an amino acid sequence of SEQ ID NO: 823, HCDR2 comprising an amino acid sequence of SEQ ID NO: 824, HCDR3 comprising an amino acid sequence of SEQ ID NO: 825, LCDR1 comprising an amino acid sequence of SEQ ID NO: 826, LCDR2 comprising an amino acid sequence of SEQ ID NO: 827, and LCDR3 comprising an amino acid sequence of SEQ ID NO: 828; s) HCDR1 comprising an amino acid sequence of SEQ ID NO: 221, HCDR2 comprising an amino acid sequence of SEQ ID NO: 222, HCDR3 comprising an amino acid sequence of SEQ ID NO: 223, LCDR1 comprising an amino acid sequence of SEQ ID NO: 226, LCDR2 comprising an amino acid sequence of SEQ ID NO: 227, and LCDR3 comprising an amino acid sequence of SEQ ID NO: 228; t) HCDR1 comprising an amino acid sequence of SEQ ID NO: 260, HCDR2 comprising an amino acid sequence of SEQ ID NO: 261, HCDR3 comprising an amino acid sequence of SEQ ID NO: 262, LCDR1 comprising an amino acid sequence of SEQ ID NO: 265, LCDR2 comprising an amino acid sequence of SEQ ID NO: 266, and LCDR3 comprising an amino acid sequence of SEQ ID NO: 267; u) HCDR1 comprising an amino acid sequence of SEQ ID NO: 273, HCDR2 comprising an amino acid sequence of SEQ ID NO: 274, HCDR3 comprising an amino acid sequence of SEQ ID NO: 275, LCDR1 comprising an amino acid sequence of SEQ ID NO: 278, LCDR2 comprising an amino acid sequence of SEQ ID NO: 279, and LCDR3 comprising an amino acid sequence of SEQ ID NO: 280; v) HCDR1 comprising an amino acid sequence of SEQ ID NO: 286, HCDR2 comprising an amino acid sequence of SEQ ID NO: 287, HCDR3 comprising an amino acid sequence of SEQ ID NO: 288, LCDR1 comprising an amino acid sequence of SEQ ID NO: 291, LCDR2 comprising an amino acid sequence of SEQ ID NO: 292, and LCDR3 comprising an amino acid sequence of SEQ ID NO: 293; w) HCDR1 comprising an amino acid sequence of SEQ ID NO: 299, HCDR2 comprising an amino acid sequence of SEQ ID NO: 300, HCDR3 comprising an amino acid sequence of SEQ ID NO: 301, LCDR1 comprising an amino acid sequence of SEQ ID NO: 304, LCDR2 comprising an amino acid sequence of SEQ ID NO: 305, and LCDR3 comprising an amino acid sequence of SEQ ID NO: 306; x) HCDR1 comprising an amino acid sequence of SEQ ID NO: 312, HCDR2 comprising an amino acid sequence of SEQ ID NO: 313, HCDR3 comprising an amino acid sequence of SEQ ID NO: 314, LCDR1 comprising an amino acid sequence of SEQ ID NO: 317, LCDR2 comprising an amino acid sequence of SEQ ID NO: 318, and LCDR3 comprising an amino acid sequence of SEQ ID NO: 319; y) HCDR1 comprising an amino acid sequence of SEQ ID NO: 325, HCDR2 comprising an amino acid sequence of SEQ ID NO: 326, HCDR3 comprising an amino acid sequence of SEQ ID NO: 327, LCDR1 comprising an amino acid sequence of SEQ ID NO: 330, LCDR2 comprising an amino acid sequence of SEQ ID NO: 331, and LCDR3 comprising an amino acid sequence of SEQ ID NO: 332; z) HCDR1 comprising an amino acid sequence of SEQ ID NO: 338, HCDR2 comprising an amino acid sequence of SEQ ID NO: 339, HCDR3 comprising an amino acid sequence of SEQ ID NO: 340, LCDR1 comprising an amino acid sequence of SEQ ID NO: 343, LCDR2 comprising an amino acid sequence of SEQ ID NO: 344, and LCDR3 comprising an amino acid sequence of SEQ ID NO: 345; aa) HCDR1 comprising an amino acid sequence of SEQ ID NO: 351, HCDR2 comprising an amino acid sequence of SEQ ID NO: 352, HCDR3 comprising an amino acid sequence of SEQ ID NO: 353, LCDR1 comprising an amino acid sequence of SEQ ID NO: 356, LCDR2 comprising an amino acid sequence of SEQ ID NO: 357, and LCDR3 comprising an amino acid sequence of SEQ ID NO: 358; bb) HCDR1 comprising an amino acid sequence of SEQ ID NO: 364, HCDR2 comprising an amino acid sequence of SEQ ID NO: 365, HCDR3 comprising an amino acid sequence of SEQ ID NO: 366, LCDR1 comprising an amino acid sequence of SEQ ID NO: 369, LCDR2 comprising an amino acid sequence of SEQ ID NO: 370, and LCDR3 comprising an amino acid sequence of SEQ ID NO: 371; cc) HCDR1 comprising an amino acid sequence of SEQ ID NO: 377, HCDR2 comprising an amino acid sequence of SEQ ID NO: 378, HCDR3 comprising an amino acid sequence of SEQ ID NO: 379, LCDR1 comprising an amino acid sequence of SEQ ID NO: 382, LCDR2 comprising an amino acid sequence of SEQ ID NO: 383, and LCDR3 comprising an amino acid sequence of SEQ ID NO: 384; dd) HCDR1 comprising an amino acid sequence of SEQ ID NO: 390, HCDR2 comprising an amino acid sequence of SEQ ID NO: 391, HCDR3 comprising an amino acid sequence of SEQ ID NO: 392, LCDR1 comprising an amino acid sequence of SEQ ID NO: 395, LCDR2 comprising an amino acid sequence of SEQ ID NO: 396, and LCDR3 comprising an amino acid sequence of SEQ ID NO: 397; ee) HCDR1 comprising an amino acid sequence of SEQ ID NO: 403, HCDR2 comprising an amino acid sequence of SEQ ID NO: 404, HCDR3 comprising an amino acid sequence of SEQ ID NO: 405, LCDR1 comprising an amino acid sequence of SEQ ID NO: 408, LCDR2 comprising an amino acid sequence of SEQ ID NO: 409, and LCDR3 comprising an amino acid sequence of SEQ ID NO: 410; ff) HCDR1 comprising an amino acid sequence of SEQ ID NO: 416, HCDR2 comprising an amino acid sequence of SEQ ID NO: 417, HCDR3 comprising an amino acid sequence of SEQ ID NO: 418, LCDR1 comprising an amino acid sequence of SEQ ID NO: 421, LCDR2 comprising an amino acid sequence of SEQ ID NO: 422, and LCDR3 comprising an amino acid sequence of SEQ ID NO: 423; gg) HCDR1 comprising an amino acid sequence of SEQ ID NO: 429, HCDR2 comprising an amino acid sequence of SEQ ID NO: 430, HCDR3 comprising an amino acid sequence of SEQ ID NO: 431, LCDR1 comprising an amino acid sequence of SEQ ID NO: 434, LCDR2 comprising an amino acid sequence of SEQ ID NO: 435, and LCDR3 comprising an amino acid sequence of SEQ ID NO: 436; hh) HCDR1 comprising an amino acid sequence of SEQ ID NO: 442, HCDR2 comprising an amino acid sequence of SEQ ID NO: 443, HCDR3 comprising an amino acid sequence of SEQ ID NO: 444, LCDR1 comprising an amino acid sequence of SEQ ID NO: 447, LCDR2 comprising an amino acid sequence of SEQ ID NO: 448, and LCDR3 comprising an amino acid sequence of SEQ ID NO: 449; ii) HCDR1 comprising an amino acid sequence of SEQ ID NO: 455, HCDR2 comprising an amino acid sequence of SEQ ID NO: 456, HCDR3 comprising an amino acid sequence of SEQ ID NO: 457, LCDR1 comprising an amino acid sequence of SEQ ID NO: 460, LCDR2 comprising an amino acid sequence of SEQ ID NO: 461, and LCDR3 comprising an amino acid sequence of SEQ ID NO: 462; jj) HCDR1 comprising an amino acid sequence of SEQ ID NO: 468, HCDR2 comprising an amino acid sequence of SEQ ID NO: 469, HCDR3 comprising an amino acid sequence of SEQ ID NO: 470, LCDR1 comprising an amino acid sequence of SEQ ID NO: 473, LCDR2 comprising an amino acid sequence of SEQ ID NO: 474, and LCDR3 comprising an amino acid sequence of SEQ ID NO: 475; kk) HCDR1 comprising an amino acid sequence of SEQ ID NO: 481, HCDR2 comprising an amino acid sequence of SEQ ID NO: 482, HCDR3 comprising an amino acid sequence of SEQ ID NO: 483, LCDR1 comprising an amino acid sequence of SEQ ID NO: 486, LCDR2 comprising an amino acid sequence of SEQ ID NO: 487, and LCDR3 comprising an amino acid sequence of SEQ ID NO: 488; ll) HCDR1 comprising an amino acid sequence of SEQ ID NO: 494, HCDR2 comprising an amino acid sequence of SEQ ID NO: 495, HCDR3 comprising an amino acid sequence of SEQ ID NO: 496, LCDR1 comprising an amino acid sequence of SEQ ID NO: 499, LCDR2 comprising an amino acid sequence of SEQ ID NO: 500, and LCDR3 comprising an amino acid sequence of SEQ ID NO: 501; or mm) HCDR1 comprising an amino acid sequence of SEQ ID NO: 673, HCDR2 comprising an amino acid sequence of SEQ ID NO: 674, HCDR3 comprising an amino acid sequence of SEQ ID NO: 675, LCDR1 comprising an amino acid sequence of SEQ ID NO: 676, LCDR2 comprising an amino acid sequence of SEQ ID NO: 677, and LCDR3 comprising an amino acid sequence of SEQ ID NO: 678.

[0190] A conjugate or antibody construct can comprise a first binding domain that specifically binds to a tumor antigen. A conjugate can comprise a first binding domain comprising one or more variable domains. A conjugate or antibody construct can comprise a first binding domain comprising a light chain variable domain (VL domain). A first binding domain can comprise a VL sequence in TABLE 5. A first binding domain can comprise at least 80% sequence identity to a VL sequence in TABLE 5. A conjugate or antibody construct can comprise a first binding domain comprising a heavy chain variable domain (VH domain). A first binding domain can comprise VH sequence in TABLE 5. A first binding domain can comprise at least 80% sequence identity to any VH sequence in TABLE 5. A first binding domain can comprise at least 80% sequence identity to a sequence in TABLE 5. A conjugate or antibody construct can comprise a first binding domain comprising a light chain variable domain (VL domain). A first binding domain can comprise a VL sequence in TABLE 5 or TABLE 6. A first binding domain can comprise at least 80% sequence identity to a VL sequence in TABLE 5 or TABLE 6. A conjugate or antibody construct can comprise a first binding domain comprising a heavy chain variable domain (VH domain). A first binding domain can comprise VH sequence in TABLE 5 or TABLE 6. A first binding domain can comprise at least 80% sequence identity to any VH sequence in TABLE 5 or TABLE 6. A first binding domain can comprise at least 80% sequence identity to a sequence in TABLE 5 or TABLE 6.

[0191] A conjugate or antibody construct can comprise a first binding domain that specifically binds to a tumor antigen, wherein the first binding domain comprises: a) a VH sequence having at least 80% sequence identity to an amino acid sequence of SEQ ID NO: 12, and a VL sequence having at least 80% sequence identity to an amino acid sequence of SEQ ID NO: 17; b) a VH sequence having at least 80% sequence identity to an amino acid sequence of SEQ ID NO: 25, and a VL sequence having at least 80% sequence identity to an amino acid sequence of SEQ ID NO: 30; c) a VH sequence having at least 80% sequence identity to an amino acid sequence of SEQ ID NO: 38, and a VL sequence having at least 80% sequence identity to an amino acid sequence of SEQ ID NO: 43; d) a VH sequence having at least 80% sequence identity to an amino acid sequence of SEQ ID NO: 51, and a VL sequence having at least 80% sequence identity to an amino acid sequence of SEQ ID NO: 56; e) a VH sequence having at least 80% sequence identity to an amino acid sequence of SEQ ID NO: 64, and a VL sequence having at least 80% sequence identity to an amino acid sequence of SEQ ID NO: 69; f) a VH sequence having at least 80% sequence identity to an amino acid sequence of SEQ ID NO: 77, and a VL sequence having at least 80% sequence identity to an amino acid sequence of SEQ ID NO: 82; g) a VH sequence having at least 80% sequence identity to an amino acid sequence of SEQ ID NO: 90, and a VL sequence having at least 80% sequence identity to an amino acid sequence of SEQ ID NO: 95; h) a VH sequence having at least 80% sequence identity to an amino acid sequence of SEQ ID NO: 103, and a VL sequence having at least 80% sequence identity to an amino acid sequence of SEQ ID NO: 108; i) a VH sequence having at least 80% sequence identity to an amino acid sequence of SEQ ID NO: 116, and a VL sequence having at least 80% sequence identity to an amino acid sequence of SEQ ID NO: 121; j) a VH sequence having at least 80% sequence identity to an amino acid sequence of SEQ ID NO: 129, and a VL sequence having at least 80% sequence identity to an amino acid sequence of SEQ ID NO: 134; k) a VH sequence having at least 80% sequence identity to an amino acid sequence of SEQ ID NO: 142, and a VL sequence having at least 80% sequence identity to an amino acid sequence of SEQ ID NO: 147; 1) a VH sequence having at least 80% sequence identity to an amino acid sequence of SEQ ID NO: 155, and a VL sequence having at least 80% sequence identity to an amino acid sequence of SEQ ID NO: 160; m) a VH sequence having at least 80% sequence identity to an amino acid sequence of SEQ ID NO: 168, and a VL sequence having at least 80% sequence identity to an amino acid sequence of SEQ ID NO: 173; n) a VH sequence having at least 80% sequence identity to an amino acid sequence of SEQ ID NO: 181, and a VL sequence having at least 80% sequence identity to an amino acid sequence of SEQ ID NO: 186; o) a VH sequence having at least 80% sequence identity to an amino acid sequence of SEQ ID NO: 194, and a VL sequence having at least 80% sequence identity to an amino acid sequence of SEQ ID NO: 199; p) a VH sequence having at least 80% sequence identity to an amino acid sequence of SEQ ID NO: 207, and a VL sequence having at least 80% sequence identity to an amino acid sequence of SEQ ID NO: 212; q) a VH sequence having at least 80% sequence identity to an amino acid sequence of SEQ ID NO: 811, and a VL sequence having at least 80% sequence identity to an amino acid sequence of SEQ ID NO: 812; r) a VH sequence having at least 80% sequence identity to an amino acid sequence of SEQ ID NO: 829, and a VL sequence having at least 80% sequence identity to an amino acid sequence of SEQ ID NO: 830; s) a VH sequence having at least 80% sequence identity to an amino acid sequence of SEQ ID NO: 220, and a VL sequence having at least 80% sequence identity to an amino acid sequence of SEQ ID NO: 225; t) a VH sequence having at least 80% sequence identity to an amino acid sequence of SEQ ID NO: 259, and a VL sequence having at least 80% sequence identity to an amino acid sequence of SEQ ID NO: 264; u) a VH sequence having at least 80% sequence identity to an amino acid sequence of SEQ ID NO: 272, and a VL sequence having at least 80% sequence identity to an amino acid sequence of SEQ ID NO: 277; v) a VH sequence having at least 80% sequence identity to an amino acid sequence of SEQ ID NO: 285, and a VL sequence having at least 80% sequence identity to an amino acid sequence of SEQ ID NO: 290; w) a VH sequence having at least 80% sequence identity to an amino acid sequence of SEQ ID NO: 298, and a VL sequence having at least 80% sequence identity to an amino acid sequence of SEQ ID NO: 303; x) a VH sequence having at least 80% sequence identity to an amino acid sequence of SEQ ID NO: 311, and a VL sequence having at least 80% sequence identity to an amino acid sequence of SEQ ID NO: 316; y) a VH sequence having at least 80% sequence identity to an amino acid sequence of SEQ ID NO: 324, and a VL sequence having at least 80% sequence identity to an amino acid sequence of SEQ ID NO: 328; z) a VH sequence having at least 80% sequence identity to an amino acid sequence of SEQ ID NO: 337, and a VL sequence having at least 80% sequence identity to an amino acid sequence of SEQ ID NO: 342; aa) a VH sequence having at least 80% sequence identity to an amino acid sequence of SEQ ID NO: 350, and a VL sequence having at least 80% sequence identity to an amino acid sequence of SEQ ID NO: 355; bb) a VH sequence having at least 80% sequence identity to an amino acid sequence of SEQ ID NO: 363, and a VL sequence having at least 80% sequence identity to an amino acid sequence of SEQ ID NO: 368; cc) a VH sequence having at least 80% sequence identity to an amino acid sequence of SEQ ID NO: 376, and a VL sequence having at least 80% sequence identity to an amino acid sequence of SEQ ID NO: 381; dd) a VH sequence having at least 80% sequence identity to an amino acid sequence of SEQ ID NO: 389, and a VL sequence having at least 80% sequence identity to an amino acid sequence of SEQ ID NO: 394; ee) a VH sequence having at least 80% sequence identity to an amino acid sequence of SEQ ID NO: 402, and a VL sequence having at least 80% sequence identity to an amino acid sequence of SEQ ID NO: 407; ff) a VH sequence having at least 80% sequence identity to an amino acid sequence of SEQ ID NO: 415, and a VL sequence having at least 80% sequence identity to an amino acid sequence of SEQ ID NO: 420; gg) a VH sequence having at least 80% sequence identity to an amino acid sequence of SEQ ID NO: 428, and a VL sequence having at least 80% sequence identity to an amino acid sequence of SEQ ID NO: 433; hh) a VH sequence having at least 80% sequence identity to an amino acid sequence of SEQ ID NO: 441, and a VL sequence having at least 80% sequence identity to an amino acid sequence of SEQ ID NO: 446; ii) a VH sequence having at least 80% sequence identity to an amino acid sequence of SEQ ID NO: 454, and a VL sequence having at least 80% sequence identity to an amino acid sequence of SEQ ID NO: 459; jj) a VH sequence having at least 80% sequence identity to an amino acid sequence of SEQ ID NO: 467, and a VL sequence having at least 80% sequence identity to an amino acid sequence of SEQ ID NO: 472; kk) a VH sequence having at least 80% sequence identity to an amino acid sequence of SEQ ID NO: 480, and a VL sequence having at least 80% sequence identity to an amino acid sequence of SEQ ID NO: 485; ll) a VH sequence having at least 80% sequence identity to an amino acid sequence of SEQ ID NO: 493, and a VL sequence having at least 80% sequence identity to an amino acid sequence of SEQ ID NO: 498; or mm) a VH sequence having at least 80% sequence identity to an amino acid sequence of SEQ ID NO: 679, and a VL sequence having at least 80% sequence identity to an amino acid sequence of SEQ ID NO: 680.

[0192] A conjugate or antibody construct can comprise a first binding domain and an Fc domain, wherein the first binding domain and the Fc domain comprise an antibody. A first binding domain can bind to a tumor antigen. A conjugate or antibody construct can comprise an antibody light chain. A conjugate or antibody construct can comprise a light chain comprising a light chain sequence in TABLE 7. A conjugate or antibody construct can comprise a light chain comprising at least 80% sequence identity to a light chain sequence in TABLE 7. A conjugate or antibody construct can comprise an antibody heavy chain. A conjugate or antibody construct can comprise a heavy chain comprising a heavy chain sequence in TABLE 7. A conjugate or antibody construct can comprise a heavy chain comprising at least 80% sequence identity to any heavy chain sequence in TABLE 7 or TABLE 8. A conjugate or antibody construct can comprise at least 80% sequence identity to any sequence in TABLE 7. A conjugate or antibody construct can comprise a first binding domain and an Fc domain, wherein the first binding domain and the Fc domain comprise an antibody. A first binding domain can bind to a tumor antigen. A conjugate or antibody construct can comprise an antibody light chain. A conjugate or antibody construct can comprise a light chain comprising a light chain sequence in TABLE 7 or TABLE 8. A conjugate or antibody construct can comprise a light chain comprising at least 80% sequence identity to a light chain sequence in TABLE 7 or TABLE 8. A conjugate or antibody construct can comprise an antibody heavy chain. A conjugate or antibody construct can comprise a heavy chain comprising a heavy chain sequence in TABLE 7 or TABLE 8. A conjugate or antibody construct can comprise a heavy chain comprising at least 80% sequence identity to any heavy chain sequence in TABLE 7 or TABLE 8. A conjugate or antibody construct can comprise at least 80% sequence identity to any sequence in TABLE 7 or TABLE 8.

[0193] A conjugate or antibody construct can comprise an anti-tumor antibody, wherein the antibody comprises: a) a heavy chain sequence having at least 80% sequence identity to an amino acid sequence of SEQ ID NO: 11, and a light chain sequence having at least 80% sequence identity to an amino acid sequence of SEQ ID NO: 16; b) a heavy chain sequence having at least 80% sequence identity to an amino acid sequence of SEQ ID NO: 24, and a light chain sequence having at least 80% sequence identity to an amino acid sequence of SEQ ID NO: 29; c) a heavy chain sequence having at least 80% sequence identity to an amino acid sequence of SEQ ID NO: 37, and a light chain sequence having at least 80% sequence identity to an amino acid sequence of SEQ ID NO: 42; d) a heavy chain sequence having at least 80% sequence identity to an amino acid sequence of SEQ ID NO: 50, and a light chain sequence having at least 80% sequence identity to an amino acid sequence of SEQ ID NO: 55; e) a heavy chain sequence having at least 80% sequence identity to an amino acid sequence of SEQ ID NO: 63, and a light chain sequence having at least 80% sequence identity to an amino acid sequence of SEQ ID NO: 68; f) a heavy chain sequence having at least 80% sequence identity to an amino acid sequence of SEQ ID NO: 76, and a light chain sequence having at least 80% sequence identity to an amino acid sequence of SEQ ID NO: 81; g) a heavy chain sequence having at least 80% sequence identity to an amino acid sequence of SEQ ID NO: 89, and a light chain sequence having at least 80% sequence identity to an amino acid sequence of SEQ ID NO: 94; h) a heavy chain sequence having at least 80% sequence identity to an amino acid sequence of SEQ ID NO: 102, and a light chain sequence having at least 80% sequence identity to an amino acid sequence of SEQ ID NO: 107; i) a heavy chain sequence having at least 80% sequence identity to an amino acid sequence of SEQ ID NO: 115, and a light chain sequence having at least 80% sequence identity to an amino acid sequence of SEQ ID NO: 120; j) a heavy chain sequence having at least 80% sequence identity to an amino acid sequence of SEQ ID NO: 128, and a light chain sequence having at least 80% sequence identity to an amino acid sequence of SEQ ID NO: 133; k) a heavy chain sequence having at least 80% sequence identity to an amino acid sequence of SEQ ID NO: 141, and a light chain sequence having at least 80% sequence identity to an amino acid sequence of SEQ ID NO: 146; 1) a heavy chain sequence having at least 80% sequence identity to an amino acid sequence of SEQ ID NO: 154, and a light chain sequence having at least 80% sequence identity to an amino acid sequence of SEQ ID NO: 159; m) a heavy chain sequence having at least 80% sequence identity to an amino acid sequence of SEQ ID NO: 167, and a light chain sequence having at least 80% sequence identity to an amino acid sequence of SEQ ID NO: 172; n) a heavy chain sequence having at least 80% sequence identity to an amino acid sequence of SEQ ID NO: 180, and a light chain sequence having at least 80% sequence identity to an amino acid sequence of SEQ ID NO: 185; o) a heavy chain sequence having at least 80% sequence identity to an amino acid sequence of SEQ ID NO: 193, and a light chain sequence having at least 80% sequence identity to an amino acid sequence of SEQ ID NO: 198; p) a heavy chain sequence having at least 80% sequence identity to an amino acid sequence of SEQ ID NO: 206, and a light chain sequence having at least 80% sequence identity to an amino acid sequence of SEQ ID NO: 211; q) a heavy chain sequence having at least 80% sequence identity to an amino acid sequence of SEQ ID NO: 813, and a light chain sequence having at least 80% sequence identity to an amino acid sequence of SEQ ID NO: 814; r) a heavy chain sequence having at least 80% sequence identity to an amino acid sequence of SEQ ID NO: 831, and a light chain sequence having at least 80% sequence identity to an amino acid sequence of SEQ ID NO: 832; s) a heavy chain sequence having at least 80% sequence identity to an amino acid sequence of SEQ ID NO: 219, and a light chain sequence having at least 80% sequence identity to an amino acid sequence of SEQ ID NO: 224; t) a heavy chain sequence having at least 80% sequence identity to an amino acid sequence of SEQ ID NO: 258, and a light chain sequence having at least 80% sequence identity to an amino acid sequence of SEQ ID NO: 263; u) a heavy chain sequence having at least 80% sequence identity to an amino acid sequence of SEQ ID NO: 271, and a light chain sequence having at least 80% sequence identity to an amino acid sequence of SEQ ID NO: 276; v) a heavy chain sequence having at least 80% sequence identity to an amino acid sequence of SEQ ID NO: 284, and a light chain sequence having at least 80% sequence identity to an amino acid sequence of SEQ ID NO: 289; w) a heavy chain sequence having at least 80% sequence identity to an amino acid sequence of SEQ ID NO: 297, and a light chain sequence having at least 80% sequence identity to an amino acid sequence of SEQ ID NO: 302; x) a heavy chain sequence having at least 80% sequence identity to an amino acid sequence of SEQ ID NO: 310, and a light chain sequence having at least 80% sequence identity to an amino acid sequence of SEQ ID NO: 315; y) a heavy chain sequence having at least 80% sequence identity to an amino acid sequence of SEQ ID NO: 323, and a light chain sequence having at least 80% sequence identity to an amino acid sequence of SEQ ID NO: 328; z) a heavy chain sequence having at least 80% sequence identity to an amino acid sequence of SEQ ID NO: 336, and a light chain sequence having at least 80% sequence identity to an amino acid sequence of SEQ ID NO: 341; aa) a heavy chain sequence having at least 80% sequence identity to an amino acid sequence of SEQ ID NO: 349, and a light chain sequence having at least 80% sequence identity to an amino acid sequence of SEQ ID NO: 354; bb) a heavy chain sequence having at least 80% sequence identity to an amino acid sequence of SEQ ID NO: 362, and a light chain sequence having at least 80% sequence identity to an amino acid sequence of SEQ ID NO: 367; cc) a heavy chain sequence having at least 80% sequence identity to an amino acid sequence of SEQ ID NO: 375, and a light chain sequence having at least 80% sequence identity to an amino acid sequence of SEQ ID NO: 380; dd) a heavy chain sequence having at least 80% sequence identity to an amino acid sequence of SEQ ID NO: 388, and a light chain sequence having at least 80% sequence identity to an amino acid sequence of SEQ ID NO: 393; ee) a heavy chain sequence having at least 80% sequence identity to an amino acid sequence of SEQ ID NO: 401, and a light chain sequence having at least 80% sequence identity to an amino acid sequence of SEQ ID NO: 406; ff) a heavy chain sequence having at least 80% sequence identity to an amino acid sequence of SEQ ID NO: 414, and a light chain sequence having at least 80% sequence identity to an amino acid sequence of SEQ ID NO: 419; gg) a heavy chain sequence having at least 80% sequence identity to an amino acid sequence of SEQ ID NO: 427, and a light chain sequence having at least 80% sequence identity to an amino acid sequence of SEQ ID NO: 432; hh) a heavy chain sequence having at least 80% sequence identity to an amino acid sequence of SEQ ID NO: 440, and a light chain sequence having at least 80% sequence identity to an amino acid sequence of SEQ ID NO: 445; ii) a heavy chain sequence having at least 80% sequence identity to an amino acid sequence of SEQ ID NO: 453, and a light chain sequence having at least 80% sequence identity to an amino acid sequence of SEQ ID NO: 458; jj) a heavy chain sequence having at least 80% sequence identity to an amino acid sequence of SEQ ID NO: 466, and a light chain sequence having at least 80% sequence identity to an amino acid sequence of SEQ ID NO: 471; kk) a heavy chain sequence having at least 80% sequence identity to an amino acid sequence of SEQ ID NO: 479, and a light chain sequence having at least 80% sequence identity to an amino acid sequence of SEQ ID NO: 484; ll) a heavy chain sequence having at least 80% sequence identity to an amino acid sequence of SEQ ID NO: 492, and a light chain sequence having at least 80% sequence identity to an amino acid sequence of SEQ ID NO: 497; or mm) a heavy chain sequence having at least 80% sequence identity to an amino acid sequence of SEQ ID NO: 681, and a light chain sequence having at least 80% sequence identity to an amino acid sequence of SEQ ID NO: 682.

[0194] A conjugate or antibody construct can comprise a second binding domain. A conjugate or antibody construct can comprise a second binding domain that specifically binds to an antigen. A conjugate or antibody construct can comprise a second binding domain that specifically binds to a molecule on an immune cell. An immune cell can be a T cell, B cell, dendritic cell, macrophage, NK cell, or NKT cell. In some embodiments, an immune cell is a T cell, B cell, NK cell, or NKT cell. In some embodiments, an immune cell is an antigen presenting cell. A conjugate or antibody construct can comprise a second binding domain that specifically binds to a molecule on an immune cell such as an antigen presenting cell. An antigen presenting cell can be a dendritic cell or a macrophage. A second binding domain can specifically bind to a molecule on an immune cell, wherein the molecule comprises at least 80% homology to an amino acid sequence of a group consisting of CD40, DEC-205, CD36 mannose scavenger receptor 1, CLEC9A, DC-SIGN, CLEC12A, BDCA-2, OX40L, 41BBL, CD204, MARCO, CLEC5A, Dectin 1, Dectin 2, CLEC10A, CD206, CD64, CD32A, CD16A, HVEM, CD32B, PD-L1, and CD47. A second binding domain can specifically bind to a molecule on an immune cell, wherein the molecule comprises at least 80% homology to an amino acid sequence of a group consisting of DEC-205, CD36 mannose scavenger receptor 1, CLEC9A, DC-SIGN, CLEC12A, BDCA-2, OX40L, 41BBL, CD204, MARCO, CLEC5A, Dectin 1, Dectin 2, CLEC10A, CD206, CD64, CD32A, CD16A, HVEM, and CD32B. A second binding domain can specifically bind to a molecule on an immune cell, wherein the molecule comprises at least 80% homology to an amino acid sequence of a group consisting of tumor necrosis factor receptor 2 (TNFR2) or triggering receptor expressed on myeloid cells 2 (TREM2). A second binding domain can specifically bind to a molecule on an antigen presenting cell, wherein the molecule comprises at least 80% homology to a group consisting of CD40, DEC-205, CD36 mannose scavenger receptor 1, CLEC9A, DC-SIGN, CLEC12A, BDCA-2, OX40L, 41BBL, CD204, MARCO, CLEC5A, Dectin 1, Dectin 2, CLEC10A, CD206, CD64, CD32A, CD16A, HVEM, PD-L1, CD47, and CD32B. A second binding domain can specifically bind to a molecule on an antigen presenting cell, wherein the molecule comprises at least 80% homology to a group consisting of DEC-205, CD36 mannose scavenger receptor 1, CLEC9A, DC-SIGN, CLEC12A, BDCA-2, OX40L, 41BBL, CD204, MARCO, CLEC5A, Dectin 1, Dectin 2, CLEC10A, CD206, CD64, CD32A, CD16A, HVEM, and CD32B. TABLE 2 shows exemplary amino acid sequences of molecules on an immune cell to which a second binding domain can specifically bind.

TABLE 2
Exemplary amino acid sequences of molecules on an immune
cell to which a second binding domain can specifically bind

| Immune Cell Molecule | SEQ ID NO: |
|---|---|
| CD40 (isoform I) | 958 |
| CD40 (isoform II) | 959 |
| DEC-205 (isoform 4) | 960 |
| DEC-205 (isoform 2) | 961 |
| DEC-205 (isoform 5) | 962 |
| DEC-205 (isoform 3) | 963 |
| DEC-205 (isoform 1) | 964 |
| CD36 mannose | 965 |
| scavenger receptor 1 | |
| (isoform 1) | |
| CD36 mannose | 966 |
| scavenger receptor 1 | |
| (isoform 2) | |
| CLEC9A | 967 |
| DC-SIGN (isoform 1) | 968 |
| DC-SIGN (isoform 2) | 969 |
| DC-SIGN (isoform 3) | 970 |
| DC-SIGN (isoform 4) | 971 |
| DC-SIGN (isoform 5) | 972 |
| DC-SIGN (isoform 6) | 973 |
| DC-SIGN (isoform 7) | 974 |
| DC-SIGN (isoform 8) | 975 |
| DC-SIGN (isoform 9) | 976 |
| DC-SIGN (isoform 10) | 977 |
| DC-SIGN (isoform 11) | 978 |
| DC-SIGN (isoform 12) | 979 |
| CLEC12A (isoform 2) | 980 |
| CLEC12A (isoform 1) | 981 |
| CLEC12A (isoform 3) | 982 |
| CLEC12A (isoform 4) | 983 |
| CLEC12A (isoform 5) | 984 |
| BDCA-2 (isoform 1) | 985 |
| BDCA-2 (isoform 2) | 986 |
| OX40L (isoform 1) | 987 |
| OX40L (isoform 2) | 988 |
| 41BBL | 989 |
| CD204 (isoform I) | 990 |
| CD204 (isoform II) | 991 |
| CD204 (isoform III) | 992 |
| MARCO (isoform 1) | 993 |
| MARCO (isoform 2) | 994 |
| CLEC5A (isoform 1) | 995 |
| CLEC5A (isoform 2) | 996 |
| Dectin 1 (isoform 1) | 997 |
| Dectin 1 (isoform 2) | 998 |
| Dectin 1 (isoform 3) | 999 |
| Dectin 1 (isoform 4) | 1000 |
| Dectin 1 (isoform 5) | 1001 |
| Dectin 1 (isoform 6) | 1002 |
| Dectin 1 (isoform 7) | 1003 |
| Dectin 1 (isoform 8) | 1004 |
| Dectin 1 (isoform 9) | 1005 |
| Dectin 1 (isoform 10) | 1006 |
| Dectin 2 (isoform 1) | 1007 |
| Dectin 2 (isoform 2) | 1008 |
| CLEC10A (isoform 1) | 1009 |
| CLEC10A (isoform 2) | 1010 |
| CLEC10A (isoform 3) | 1011 |
| CD206 (isoform 1) | 1012 |
| CD206 (isoform 2) | 1013 |
| CD64 (isoform 1) | 1014 |
| CD64 (isoform 2) | 1015 |
| CD32A (isoform 1) | 1016 |
| CD32A (isoform 2) | 1017 |
| CD32A (isoform 3) | 1018 |
| CD16A | 1019 |
| HVEM (isoform 1) | 1020 |
| HVEM (isoform 2) | 1021 |
| CD32B (isoform IIB2) | 1022 |
| CD32B (isoform IIB3) | 1023 |
| CD32B (isoform 4) | 1024 |
| CD32B (isoform 5) | 1025 |
| PD-L1 (isoform 1) | 955 |
| PD-L1 (isoform 2) | 956 |
| PD-L1 (isoform 3) | 957 |
| CD47 (isoform OA3- | 1026 |
| 323) | |
| CD47 (isoform OA3- | 1027 |
| 293) | |
| CD47 (isoform OA3- | 1028 |
| 305) | |
| CD47 (isoform OA3- | 1029 |
| 312) | |

[0195] In some embodiments, an amino acid sequence of the antigen on the antigen presenting cell has at least 80% sequence identity with the amino acid sequence of an antigen selected from the group consisting of CD40, DEC-205, CD36 mannose scavenger receptor 1, CLEC9A, DC-SIGN, CLEC12A, BDCA-2, OX40L, 41BBL, CD204, MARCO, CLEC5A, Dectin 1, Dectin 2, CLEC10A, CD206, CD64, CD32A, CD16A, HVEM, PD-L1, CD32B, and CD47, but not CD40 when the first binding domain specifically binds to HER2.

[0196] In some embodiments, an amino acid sequence of the antigen on the antigen presenting cell has at least 80% sequence identity with the amino acid sequence of an antigen selected from TABLE 2. In some embodiments, the second binding domain is a CD40 agonist. In some embodiments, the first binding domain comprises a single chain variable fragment (scFv). In some embodiments, the second binding domain is a single chain variable fragment (scFv). In some embodiments, the second binding domain comprises a single chain variable fragment from an anti-CD40 antibody, an anti-DEC-205 antibody, an anti-CD36 mannose scavenger receptor 1 antibody, an anti-DC-SIGN antibody, an anti-CLEC9A antibody, an anti-CLEC12A antibody, an anti-BDCA-2 antibody, an anti-OX40L antibody, an anti-41BBL antibody, an anti-CD204 antibody, an anti-MARCO antibody, an anti-CLEC5A antibody, an anti-Dectin 1 antibody, an anti-Dectin 2 antibody, an anti-CLEC10A antibody, an anti-CD206 antibody, an anti-CD64 antibody, an anti-CD32A antibody, an anti-CD16A antibody, an anti-HVEM antibody, an anti-PD-L1, or an anti-CD32B antibody.

[0197] A conjugate or antibody construct can comprise an Fc domain. A conjugate or antibody construct can comprise a first binding domain, a second binding domain, and an Fc domain, wherein the first binding domain is attached to the Fc domain. A conjugate or antibody construct can comprise a first binding domain, a second binding domain, and an Fc domain, wherein the second binding domain is attached to the Fc domain. A first binding domain can be attached to an Fc domain as a fusion peptide. A second binding domain can be attached to an Fc domain as a fusion peptide. A first binding domain can be attached to an Fc domain via a linker. A second binding domain can be attached to an Fc domain via a linker.

[0198] A conjugate or antibody construct can comprise a second binding domain comprising one or more CDRs. A second binding domain can comprise a sequence or pair of sequences in TABLE 11. A second binding domain can comprise a sequence or pair of sequences in TABLE 11 or TABLE 12.

[0199] A conjugate or antibody construct can comprise a second binding domain that specifically binds CD40. A conjugate can comprise a second binding domain that is a CD40 agonist. A conjugate or antibody construct can comprise a second binding domain that binds CD40, wherein the second binding domain comprises at least 80% sequence identity to: a) HCDR1 comprising an amino acid sequence of SEQ ID NO: 3, HCDR2 comprising an amino acid sequence of SEQ ID NO: 4, HCDR3 comprising an amino acid sequence of SEQ ID NO: 5, LCDR1 comprising an amino acid sequence of SEQ ID NO: 8, LCDR2 comprising an amino acid sequence of SEQ ID NO: 9, and LCDR3 comprising an amino acid sequence of SEQ ID NO: 10; b) HCDR1 comprising an amino acid sequence of SEQ ID NO: 582, HCDR2 comprising an amino acid sequence of SEQ ID NO: 583, HCDR3 comprising an amino acid sequence of SEQ ID NO: 584, LCDR1 comprising an amino acid sequence of SEQ ID NO: 587, LCDR2 comprising an amino acid sequence of SEQ ID NO: 588, and LCDR3 comprising an amino acid sequence of SEQ ID NO: 589; c) HCDR1 comprising an amino acid sequence of SEQ ID NO: 592, HCDR2 comprising an amino acid sequence of SEQ ID NO: 593, HCDR3 comprising an amino acid sequence of SEQ ID NO: 594, LCDR1 comprising an amino acid sequence of SEQ ID NO: 597, LCDR2 comprising an amino acid sequence of SEQ ID NO: 598, and LCDR3 comprising an amino acid sequence of SEQ ID NO: 599; d) HCDR1 comprising an amino acid sequence of SEQ ID NO: 602, HCDR2 comprising an amino acid sequence of SEQ ID NO: 603, HCDR3 comprising an amino acid sequence of SEQ ID NO: 604, LCDR1 comprising an amino acid sequence of SEQ ID NO: 607, LCDR2 comprising an amino acid sequence of SEQ ID NO: 608, and LCDR3 comprising an amino acid sequence of SEQ ID NO: 609; e) HCDR1 comprising an amino acid sequence of SEQ ID NO: 612, HCDR2 comprising an amino acid sequence of SEQ ID NO: 613, HCDR3 comprising an amino acid sequence of SEQ ID NO: 614, LCDR1 comprising an amino acid sequence of SEQ ID NO: 617, LCDR2 comprising an amino acid sequence of SEQ ID NO: 618, and LCDR3 comprising an amino acid sequence of SEQ ID NO: 619; f) HCDR1 comprising an amino acid sequence of SEQ ID NO: 622, HCDR2 comprising an amino acid sequence of SEQ ID NO: 623, HCDR3 comprising an amino acid sequence of SEQ ID NO: 624, LCDR1 comprising an amino acid sequence of SEQ ID NO: 627, LCDR2 comprising an amino acid sequence of SEQ ID NO: 628, and LCDR3 comprising an amino acid sequence of SEQ ID NO: 629; or g) HCDR1 comprising an amino acid sequence of SEQ ID NO: 632, HCDR2 comprising an amino acid sequence of SEQ ID NO: 633, HCDR3 comprising an amino acid sequence of SEQ ID NO: 634, LCDR1 comprising an amino acid sequence of SEQ ID NO: 637, LCDR2 comprising an amino acid sequence of SEQ ID NO: 638, and LCDR3 comprising an amino acid sequence of SEQ ID NO: 639.

[0200] A conjugate or antibody construct can comprise a second binding domain that specifically binds DC-SIGN. A conjugate or antibody construct can comprise a second binding domain that binds DC-SIGN, wherein the second binding domain comprises at least 80% sequence identity to: a) HCDR1 comprising an amino acid sequence of SEQ ID NO: 640, HCDR2 comprising an amino acid sequence of SEQ ID NO: 641, HCDR3 comprising an amino acid sequence of SEQ ID NO: 642, LCDR1 comprising an amino acid sequence of SEQ ID NO: 643, LCDR2 comprising an amino acid sequence of SEQ ID NO: 644, and LCDR3 comprising an amino acid sequence of SEQ ID NO: 645; b) HCDR1 comprising an amino acid sequence of SEQ ID NO: 646, HCDR2 comprising an amino acid sequence of SEQ ID NO: 647, HCDR3 comprising an amino acid sequence of SEQ ID NO: 648, LCDR1 comprising an amino acid sequence of SEQ ID NO: 649, LCDR2 comprising an amino acid sequence of SEQ ID NO: 650, and LCDR3 comprising an amino acid sequence of SEQ ID NO: 651; or c) HCDR1 comprising an amino acid sequence of SEQ ID NO: 652, HCDR2 comprising an amino acid sequence of SEQ ID NO: 653, HCDR3 comprising an amino acid sequence of SEQ ID NO: 654, LCDR1 comprising an amino acid sequence of SEQ ID NO: 655, LCDR2 comprising an amino acid sequence of SEQ ID NO: 656, and LCDR3 comprising an amino acid sequence of SEQ ID NO: 657.

[0201] A conjugate or antibody construct can comprise a second binding domain that specifically binds DEC-205. A conjugate or antibody construct comprising a second binding domain that binds DEC-205 can comprise at least 80% sequence identity to: a) HCDR1 comprising an amino acid sequence of SEQ ID NO: 234, HCDR2 comprising an amino acid sequence of SEQ ID NO: 235, HCDR3 comprising an amino acid sequence of SEQ ID NO: 236, LCDR1 comprising an amino acid sequence of SEQ ID NO: 239, LCDR2 comprising an amino acid sequence of SEQ ID NO: 240, and LCDR3 comprising an amino acid sequence of SEQ ID NO: 241; or b) HCDR1 comprising an amino acid sequence of SEQ ID NO: 247, HCDR2 comprising an amino acid sequence of SEQ ID NO: 248, HCDR3 comprising an amino acid sequence of SEQ ID NO: 249, LCDR1 comprising an amino acid sequence of SEQ ID NO: 252, LCDR2 comprising an amino acid sequence of SEQ ID NO: 253, and LCDR3 comprising an amino acid sequence of SEQ ID NO: 254.

[0202] A conjugate or antibody construct can comprise a second binding domain comprising one or more variable domains. A conjugate or antibody construct can comprise a second binding domain comprising a light chain variable domain (VL domain). A second binding domain can comprise at least 80% sequence identity to any VL sequence in TABLE 13. A conjugate or antibody construct can comprise a second binding domain comprising a heavy chain variable domain. A second binding domain can comprise at least 80% sequence identity to any VH sequence in TABLE 13. A second binding domain can comprise at least 80% sequence identity to any sequence in TABLE 13. A second binding domain can comprise at least 80% sequence identity to any VL sequence in TABLE 13 or TABLE 14. A conjugate or antibody construct can comprise a second binding domain comprising a heavy chain variable domain. A second binding domain can comprise at least 80% sequence identity to any VH sequence in TABLE 13 or TABLE 14. A second binding domain can comprise at least 80% sequence identity to any sequence in TABLE 13 or TABLE 14.

[0203] A conjugate or antibody construct can comprise a second binding domain that specifically binds CD40. A conjugate or antibody construct can comprise a second binding domain that is a CD40 agonist. A conjugate or antibody construct can comprise a second binding domain that binds CD40, wherein the second binding domain comprises: a) a VH sequence having at least 80% sequence identity to an amino acid sequence of SEQ ID NO: 2, and a VL sequence having at least 80% sequence identity to an amino acid sequence of SEQ ID NO: 7; b) a VH sequence having at least 80% sequence identity to an amino acid sequence of SEQ ID NO: 581, and a VL sequence having at least 80% sequence identity to an amino acid sequence of SEQ ID NO: 586; c) a VH sequence having at least 80% sequence identity to an amino acid sequence of SEQ ID NO: 591, and a VL sequence having at least 80% sequence identity to an amino acid sequence of SEQ ID NO: 596; d) a VH sequence having at least 80% sequence identity to an amino acid sequence of SEQ ID NO: 601, and a VL sequence having at least 80% sequence identity to an amino acid sequence of SEQ ID NO: 606; e) a VH sequence having at least 80% sequence identity to an amino acid sequence of SEQ ID NO: 611, and a VL sequence having at least 80% sequence identity to an amino acid sequence of SEQ ID NO: 616; f) a VH sequence having at least 80% sequence identity to an amino acid sequence of SEQ ID NO: 621, and a VL sequence having at least 80% sequence identity to an amino acid sequence of SEQ ID NO: 626; g) a VH sequence having at least 80% sequence identity to an amino acid sequence of SEQ ID NO: 631, and a VL sequence having at least 80% sequence identity to an amino acid sequence of SEQ ID NO: 636.

[0204] A conjugate or antibody construct can comprise a second binding domain that specifically binds DEC-205. A conjugate or antibody construct can comprise a second binding domain that binds DEC-205, wherein the second binding domain comprises: a) a VH sequence having at least 80% sequence identity to an amino acid sequence of SEQ ID NO: 233, and a VL sequence having at least 80% sequence identity to an amino acid sequence of SEQ ID NO: 238; or b) a VH sequence having at least 80% sequence identity to an amino acid sequence of SEQ ID NO: 246, and a VL sequence having at least 80% sequence identity to an amino acid sequence of SEQ ID NO: 251.

[0205] A conjugate or antibody construct can comprise a second binding domain that specifically binds CD36 mannose scavenger receptor 1. A conjugate or antibody construct can comprise a second binding domain that binds CD36 mannose scavenger receptor 1, wherein the second binding domain comprises a VH sequence having at least 80% sequence identity to an amino acid sequence of SEQ ID NO: 658, and a VL sequence having at least 80% sequence identity to an amino acid sequence of SEQ ID NO: 659.

[0206] A conjugate or antibody construct can comprise a second binding domain that specifically binds CLEC9A. A conjugate or antibody construct can comprise a second binding domain that binds CLEC9A, wherein the second binding domain comprises a VH sequence having at least 80% sequence identity to an amino acid sequence of SEQ ID NO: 660, and a VL sequence having at least 80% sequence identity to an amino acid sequence of SEQ ID NO: 661.

[0207] A conjugate or antibody construct can comprise a second binding domain and an Fc domain, wherein the second binding domain and the Fc domain comprise an antibody. A conjugate or antibody construct can comprise a heavy chain and a light chain that target a molecule expressed by an immune cell such as an antigen presenting cell. A conjugate or antibody construct can comprise an antibody light chain. A conjugate or antibody construct can comprise a light chain comprising at least 80% sequence identity to any light chain sequence in TABLE 15. A conjugate or antibody construct can comprise an antibody heavy chain. A conjugate or antibody construct can comprise a heavy chain comprising at least 80% sequence identity to any heavy chain sequence in TABLE 15. A conjugate or antibody construct can comprise at least 80% sequence identity to any sequence in TABLE 15. A conjugate or antibody construct can comprise a light chain comprising at least 80% sequence identity to any light chain sequence in TABLE 15 or TABLE 16. A conjugate or antibody construct can comprise an antibody heavy chain. A conjugate or antibody construct can comprise a heavy chain comprising at least 80% sequence identity to any heavy chain sequence in TABLE 15 or TABLE 16. A conjugate or antibody construct can comprise at least 80% sequence identity to any sequence in TABLE 15 or TABLE 16.

[0208] A conjugate or antibody construct can comprise a heavy chain and a light chain that target a molecule expressed by an immune cell such as an antigen presenting cell. A conjugate or antibody construct can comprise a first binding domain and an Fc domain, wherein the first binding domain and the Fc domain comprise an antibody. A conjugate or antibody construct can comprise an anti-CD40 antibody, the conjugate comprising: a) a heavy chain sequence having at least 80% sequence identity to an amino acid sequence of SEQ ID NO: 1 and a light chain sequence having at least 80% sequence identity to an amino acid sequence of SEQ ID NO: 6; b) a heavy chain sequence having at least 80% sequence identity to an amino acid sequence of SEQ ID NO: 577 or SEQ ID NO: 578, and a light chain sequence having at least 80% sequence identity to an amino acid sequence of SEQ ID NO: 579; c) a heavy chain sequence having at least 80% sequence identity to an amino acid sequence of SEQ ID NO: 580, and a light chain sequence having at least 80% sequence identity to an amino acid sequence of SEQ ID NO: 585; d) a heavy chain sequence having at least 80% sequence identity to an amino acid sequence of SEQ ID NO: 590, and a light chain sequence having at least 80% sequence identity to an amino acid sequence of SEQ ID NO: 595; e) a heavy chain sequence having at least 80% sequence identity to an amino acid sequence of SEQ ID NO: 600, and a light chain sequence having at least 80% sequence identity to an amino acid sequence of SEQ ID NO: 605; f) a heavy chain sequence having at least 80% sequence identity to an amino acid sequence of SEQ ID NO: 610, and a light chain sequence having at least 80% sequence identity to an amino acid sequence of SEQ ID NO: 615; g) a heavy chain sequence having at least 80% sequence identity to an amino acid sequence of SEQ ID NO: 620, and a light chain sequence having at least 80% sequence identity to an amino acid sequence of SEQ ID NO: 625; or h) a heavy chain sequence having at least 80% sequence identity to an amino acid sequence of SEQ ID NO: 630, and a light chain sequence having at least 80% sequence identity to an amino acid sequence of SEQ ID NO: 635.

[0209] A conjugate or antibody construct can comprise a first binding domain and an Fc domain, wherein the first binding domain and the Fc domain comprise an antibody. A conjugate or antibody construct can comprise an anti-DEC-205 antibody, the conjugate or antibody construct comprising: a) a heavy chain sequence having at least 80% sequence identity to an amino acid sequence of SEQ ID NO: 232, and a light chain sequence having at least 80% sequence identity to an amino acid sequence of SEQ ID NO: 237; or b) a heavy chain sequence having at least 80% sequence identity to an amino acid sequence of SEQ ID NO: 245, and a light chain sequence having at least 80% sequence identity to an amino acid sequence of SEQ ID NO: 250.

[0210] A conjugate or antibody construct can comprise a first binding domain and an Fc domain, wherein the first binding domain and the Fc domain comprise an antibody. A conjugate or antibody construct can comprise an anti-CLEC12A antibody, the conjugate comprising: a) a heavy chain sequence having at least 80% sequence identity to an amino acid sequence of SEQ ID NO: 662, and a light chain sequence having at least 80% sequence identity to an amino acid sequence of SEQ ID NO: 665; b) a heavy chain sequence having at least 80% sequence identity to an amino acid sequence of SEQ ID NO: 663, and a light chain sequence having at least 80% sequence identity to an amino acid sequence of SEQ ID NO: 665; or c) a heavy chain sequence having at least 80% sequence identity to an amino acid sequence of SEQ ID NO: 664, and a light chain sequence having at least 80% sequence identity to an amino acid sequence of SEQ ID NO: 665.

[0211] A conjugate or antibody construct can comprise a first binding domain and an Fc domain, wherein the first binding domain and the Fc domain comprise an antibody. A conjugate or antibody construct can comprise an anti-BDCA-2 antibody, the conjugate comprising: a) a heavy chain sequence having at least 80% sequence identity to an amino acid sequence of SEQ ID NO: 666, and a light chain sequence having at least 80% sequence identity to an amino acid sequence of SEQ ID NO: 669; b) a heavy chain sequence having at least 80% sequence identity to an amino acid sequence of SEQ ID NO: 667, and a light chain sequence having at least 80% sequence identity to an amino acid sequence of SEQ ID NO: 670; or c) a heavy chain sequence having at least 80% sequence identity to an amino acid sequence of SEQ ID NO: 668, and a light chain sequence having at least 80% sequence identity to an amino acid sequence of SEQ ID NO: 671.

### Antibody-ScFv Fusion Protein Products

[0212] A conjugate or antibody construct can comprise a first binding domain, a second binding domain, and an Fc domain, wherein the first binding domain and the second binding domain are attached to the Fc domain. The first binding domain and the second binding domain can be attached to the Fc domain as a fusion peptide (also referred to as a fusion protein). The first binding domain can be attached to the Fc domain at an N-terminal end of the Fc domain, wherein the second binding domain can be attached to the Fc domain at a C-terminal end. The first binding domain can be attached to the Fc domain at an N-terminal end of the Fc domain, wherein the second binding domain can be attached to the Fc domain at a C-terminal end via a polypeptide linker ranging from 10 to 25 amino acids comprising the sequence [G4S]n where n=2 to 5 (SEQ ID NO: 1330). Alternatively, the first binding domain can be attached to the Fc domain at a C-terminal end of the Fc domain, wherein the second binding domain can be attached to the Fc domain at an N-terminal end. A second binding domain and an Fc domain can comprise an antibody and a first binding domain can comprise a single chain variable fragment (scFv). A single chain variable fragment can comprise a heavy chain variable domain and a light chain variable domain of an antibody. The first binding domain of the fusion peptide can be attached to the second binding domain at a heavy chain variable domain of the single chain variable fragment of the first binding domain (HL orientation). Alternatively, the first binding domain of the fusion peptide can be attached to the second binding domain at a light chain variable domain of the single chain variable fragment of the first binding domain (LH orientation). In either orientation, the first binding domain and the second binding domain can be attached via a polypeptide linker varying in length from 15 to 25 amino acids, wherein the linker comprises the sequence [G4S]n where n=3 to 5 (SEQ ID NO: 1331).

[0213] Alternatively, a first binding domain and an Fc domain can comprise an antibody and the second binding domain can comprise a single chain variable fragment (scFv). The second binding domain of the fusion peptide can be attached to the first binding domain at a heavy chain variable domain of the single chain variable fragment of the first binding domain (HL orientation). Alternatively, the second binding domain of the fusion peptide can be attached to the first binding domain at a light chain variable domain of the single chain variable fragment of the first binding domain (LH orientation).

[0214] A conjugate or antibody construct can comprise a first binding domain and a second binding domain, wherein the second binding domain can be attached to the first binding domain. The conjugate or antibody construct can comprise an antibody comprising a light chain and a heavy chain. The first binding domain can comprise a Fab fragment of the light and heavy chains. The second binding domain can be attached to the light chain at a C-terminus or C-terminal end of the light chain as a fusion peptide. The second binding domain can comprise a single chain variable fragment (scFv).

[0215] A conjugate or antibody construct can comprise a first binding domain, a second binding domain, and an Fc domain, wherein the first binding domain and the second binding domain are attached to the Fc domain as a fusion peptide. The second binding domain of the fusion peptide can specifically bind to an antigen with at least 80% homology to CD40. The second binding domain of the fusion peptide can be a CD40 agonist. The first binding domain of the fusion peptide can target a tumor antigen. The conjugate or antibody construct can comprise a fusion peptide comprising a heavy chain (HC) attached to a single chain variable fragment. The conjugate or antibody construct comprising the fusion peptide can comprise a sequence in TABLE 9. The conjugate or antibody construct comprising the fusion peptide can comprise at least 80% sequence identity to any sequence in TABLE 9. The conjugate or antibody construct comprising the fusion peptide can comprise at least 80% sequence identity to a sequence of a heavy chain CD40 monoclonal antibody (mAb) with tumor ScFv in TABLE 9. The conjugate or antibody construct can comprise a fusion peptide comprising a sequence of a heavy chain CD40 mAb with tumor ScFv in TABLE 9 and a light chain comprising SEQ ID NO: 6. The conjugate or antibody construct can comprise a fusion peptide comprising at least 80% sequence identity to a sequence of a heavy chain CD40 mAb with tumor ScFv in TABLE 9 and a light chain comprising at least 80% sequence identity to SEQ ID NO: 6. The conjugate or antibody construct comprising the fusion peptide can comprise a sequence of a heavy chain tumor mAb with CD40 ScFv in TABLE 9. The conjugate or construct comprising the fusion peptide can comprise at least 80% sequence identity to any sequence of a heavy chain tumor mAb with CD40 ScFv in TABLE 9. The conjugate or antibody construct comprising the fusion peptide can comprise a sequence of a heavy chain tumor antigen mAb with CD40 ScFv in TABLE 9, and a light chain mAb for the tumor antigen in TABLE 7. The conjugate or antibody construct comprising the fusion peptide can comprise at least 80% sequence identity to any sequence of a heavy chain tumor antigen mAb with CD40 ScFv in TABLE 9, and at least 80% sequence identity to a light chain mAb for the tumor antigen in TABLE 7.

[0216] The conjugate or antibody construct comprising the fusion peptide can comprise a sequence in TABLE 9 or TABLE 10. The conjugate or antibody construct comprising the fusion peptide can comprise at least 80% sequence identity to any sequence in TABLE 9 or TABLE 10. The conjugate or antibody construct comprising the fusion peptide can comprise at least 80% sequence identity to a sequence of a heavy chain CD40 monoclonal antibody (mAb) with tumor ScFv in TABLE 9 or TABLE 10. The conjugate or antibody construct can comprise a fusion peptide comprising a sequence of a heavy chain CD40 mAb with tumor ScFv in TABLE 9 or TABLE 10 and a light chain comprising SEQ ID NO: 6. The conjugate or antibody construct can comprise a fusion peptide comprising at least 80% sequence identity to a sequence of a heavy chain CD40 mAb with tumor ScFv in TABLE 9 or TABLE 10 and a light chain comprising at least 80% sequence identity to SEQ ID NO: 6. The conjugate or antibody construct comprising the fusion peptide can comprise a sequence of a heavy chain tumor mAb with CD40 ScFv in TABLE 9 or TABLE 10. The conjugate or construct comprising the fusion peptide can comprise at least 80% sequence identity to any sequence of a heavy chain tumor mAb with CD40 ScFv in TABLE 9 or TABLE 10. The conjugate or antibody construct comprising the fusion peptide can comprise a sequence of a heavy chain tumor antigen mAb with CD40 ScFv in TABLE 9 or TABLE 10, and a light chain mAb for the tumor antigen in TABLE 7 or TABLE 8. The conjugate or antibody construct comprising the fusion peptide can comprise at least 80% sequence identity to any sequence of a heavy chain tumor antigen mAb with CD40 ScFv in TABLE 9 or TABLE 10, and at least 80% sequence identity to a light chain mAb for the tumor antigen in TABLE 7 or TABLE 8.

[0217] A conjugate or antibody construct can comprise a first binding domain and a second binding domain, wherein the second binding domain can be attached to the first binding domain. A conjugate or antibody construct can comprise a first binding domain, a second binding domain, and an Fc domain, wherein the second binding domain can be attached to the first binding domain. The second binding domain can be attached at a C-terminal end of the first binding domain as a fusion peptide. The first binding domain can comprise a Fab fragment comprising a light chain, wherein the second binding domain can be attached at a C-terminal end of the light chain as a fusion peptide. The second binding domain of the fusion peptide can comprise a single chain variable fragment (scFv). The second binding domain of the fusion peptide can be attached to the first binding domain at a heavy chain variable domain of the single chain variable fragment of the first binding domain (HL orientation). Alternatively, the second binding domain of the fusion peptide can be attached to the first binding domain at a light chain variable domain of the single chain variable fragment of the first binding domain (LH orientation). For example, a fusion peptide comprising a light chain of an anti-CEA antibody attached to an anti-CD40 scFv in the LH orientation can be illustrated by SEQ ID NO: 842. All fusion sequences comprising an scFv sequence are in the HL orientation unless indicated otherwise (e.g., sequence name recites “(LH)” indicating light heavy orientation).

[0218] The first binding domain of the fusion peptide can target a tumor antigen. The second binding domain of the fusion peptide can target an APC antigen. The second binding domain of the fusion peptide can target CD40. The first binding domain can comprise a Fab fragment comprising a light chain, wherein the second binding domain is attached at a C-terminal end of the light chain as a fusion peptide. The conjugate or antibody construct comprising the fusion peptide can comprise a sequence in TABLE 18. The conjugate or antibody construct comprising the fusion peptide can comprise at least 80% sequence identity to any sequence in TABLE 18. The conjugate or antibody construct comprising the fusion peptide can comprise a sequence of a light chain CD40 mAb with tumor ScFv in TABLE 18. The conjugate or antibody construct comprising the fusion peptide can comprise at least 80% sequence identity to any sequence of a light chain CD40 mAb with tumor ScFv in TABLE 18. The conjugate or antibody construct can comprise a fusion peptide comprising a sequence of a light chain CD40 mAb with tumor ScFv in TABLE 11 and a heavy chain comprising SEQ ID NO: 1. The conjugate or antibody construct can comprise a fusion peptide comprising at least 80% sequence identity to any sequence of a light chain CD40 mAb with tumor ScFv in TABLE 11 and a heavy chain comprising at least 80% sequence identity to SEQ ID NO: 1. The conjugate or antibody construct comprising the fusion peptide can comprise a sequence of a light chain tumor mAb with CD40 ScFv in TABLE 18. The conjugate or antibody construct comprising the fusion peptide can comprise at least 80% sequence identity to any sequence of a light chain tumor mAb with CD40 ScFv in TABLE 18. The conjugate or antibody construct can comprise a fusion peptide comprising a sequence of a light chain tumor antigen mAb with CD40 ScFv in TABLE 18, and a heavy chain mAb for the tumor antigen in TABLE 7. The conjugate or antibody construct can comprise a fusion peptide comprising at least 80% sequence identity to any sequence of a light chain tumor antigen mAb with CD40 ScFv in TABLE 18, and at least 80% sequence identity to a heavy chain mAb for the tumor antigen in TABLE 7. The conjugate or antibody construct can comprise a fusion peptide comprising a sequence of a light chain tumor antigen mAb with CD40 ScFv in TABLE 18, and a heavy chain mAb for the tumor antigen in TABLE 7 or TABLE 8. The conjugate or antibody construct can comprise a fusion peptide comprising at least 80% sequence identity to any sequence of a light chain tumor antigen mAb with CD40 ScFv in TABLE 18, and at least 80% sequence identity to a heavy chain mAb for the tumor antigen in TABLE 7 or TABLE 8.

[0219] A conjugate or antibody construct can comprise a first binding domain, a second binding domain, and an Fc domain, wherein the first binding domain and the second binding domain are attached to the Fc domain as a fusion peptide. The first binding domain of the fusion peptide can specifically bind to an antigen with at least 80% homology to DEC-205. The second binding domain of the fusion peptide can target a tumor antigen. The conjugate or antibody construct can comprise a fusion peptide comprising a heavy chain attached to a single chain variable fragment. The conjugate or antibody construct comprising the fusion peptide can comprise a sequence in TABLE 17. The conjugate or antibody construct comprising the fusion peptide can comprise at least 80% sequence identity to any sequence in TABLE 17. The conjugate or antibody construct comprising the fusion peptide can comprise a sequence of a heavy chain DEC-205 mAb with tumor ScFv in TABLE 17. The conjugate or antibody construct comprising the fusion peptide can comprise at least 80% sequence identity to any sequence of a heavy chain DEC-205 mAb with tumor ScFv in TABLE 17. The conjugate or antibody construct can comprise a fusion peptide comprising a sequence of a heavy chain DEC-205 mAb with tumor ScFv in TABLE 10 and a peptide comprising SEQ ID NO: 237. The conjugate or antibody construct can comprise a fusion peptide comprising at least 80% sequence identity to any sequence of a heavy chain DEC-205 mAb with tumor ScFv in TABLE 17 and a peptide comprising at least 80% sequence identity to SEQ ID NO: 237. The conjugate or antibody construct comprising the fusion peptide can comprise a sequence of a heavy chain tumor antigen mAb with CD40 ScFv in TABLE 17. The conjugate or antibody construct comprising the fusion peptide can comprise at least 80% sequence identity to any sequence of a heavy chain tumor antigen mAb with CD40 ScFv in TABLE 17. The conjugate or antibody construct comprising the fusion peptide can comprise a sequence of a heavy chain tumor antigen mAb with CD40 ScFv in TABLE 17, and a heavy chain mAb for the tumor antigen in TABLE 7. The conjugate or antibody construct comprising the fusion peptide can comprise at least 80% sequence identity to any sequence of a heavy chain tumor antigen mAb with CD40 ScFv in TABLE 17, and at least 80% sequence identity to a heavy chain mAb for the tumor antigen in TABLE 7. The conjugate or antibody construct comprising the fusion peptide can comprise a sequence of a heavy chain tumor antigen mAb with CD40 ScFv in TABLE 17, and a heavy chain mAb for the tumor antigen in TABLE 7 or TABLE 8. The conjugate or antibody construct comprising the fusion peptide can comprise at least 80% sequence identity to any sequence of a heavy chain tumor antigen mAb with CD40 ScFv in TABLE 17, and at least 80% sequence identity to a heavy chain mAb for the tumor antigen in TABLE 7 or TABLE 8.

[0220] The second binding domain of the fusion peptide can target DEC-205. The conjugate or antibody construct comprising the fusion peptide can comprise a sequence in TABLE 19. The conjugate or antibody construct comprising the fusion peptide can comprise at least 80% sequence identity to any sequence in TABLE 19. The conjugate or antibody construct comprising the fusion peptide can comprise a sequence of a light chain DEC-205 mAb with tumor ScFv in TABLE 19. The conjugate or antibody construct comprising the fusion peptide can comprise at least 80% sequence identity to any sequence of a light chain DEC-205 mAb with tumor ScFv in TABLE 19. The conjugate or antibody construct comprising a fusion peptide can comprise a sequence of a light chain DEC-205 mAb with tumor ScFv in TABLE 19 and SEQ ID NO: 237. The conjugate or antibody construct comprising a fusion peptide can comprise at least 80% sequence identity to any sequence of a light chain DEC-205 mAb with tumor ScFv in TABLE 19 and at least 80% sequence identity to SEQ ID NO: 237. The conjugate or antibody construct comprising the fusion peptide can comprise a sequence of a light chain tumor mAb with DEC-205 ScFv in TABLE 19. The conjugate or antibody construct comprising the fusion peptide can comprise at least 80% sequence identity to any sequence of a light chain tumor mAb with DEC-205 ScFv in TABLE 19. The conjugate or antibody construct comprising a fusion peptide can comprise a sequence of a light chain tumor antigen mAb with DEC-205 ScFv in TABLE 19, and a heavy chain mAb for the tumor antigen in TABLE 7. The conjugate or antibody construct comprising a fusion peptide can comprise at least 80% sequence identity to any sequence of a light chain tumor antigen mAb with DEC-205 ScFv in TABLE 19, and at least 80% sequence identity to a heavy chain mAb for the tumor antigen in TABLE 7. The conjugate or antibody construct comprising a fusion peptide can comprise a sequence of a light chain tumor antigen mAb with DEC-205 ScFv in TABLE 19, and a heavy chain mAb for the tumor antigen in TABLE 7 or TABLE 8. The conjugate or antibody construct comprising a fusion peptide can comprise at least 80% sequence identity to any sequence of a light chain tumor antigen mAb with DEC-205 ScFv in TABLE 19, and at least 80% sequence identity to a heavy chain mAb for the tumor antigen in TABLE 7 or TABLE 8.

[0221] The second binding domain of the fusion peptide can specifically bind to an antigen of an immune cell, such as an antigen presenting cell, (APC). The second binding domain of the fusion peptide can specifically bind to an antigen with at least 80% homology to CD40. The second binding domain of the fusion peptide can be a CD40 agonist. The second binding domain of the fusion peptide can specifically bind to an antigen with at least 80% homology to DEC-205. The second binding domain of the fusion peptide can specifically bind to an antigen with at least 80% homology to DC-SIGN. The second binding domain of the fusion peptide can specifically bind to an antigen with at least 80% homology to CD36 mannose scavenger receptor. The second binding domain of the fusion peptide can specifically bind to an antigen with at least 80% homology to CLEC12A. The second binding domain of the fusion peptide can specifically bind to an antigen with at least 80% homology to BDCA-2. The second binding domain of the fusion peptide can specifically bind to an antigen having an amino acid sequence with at least 80% or 100% homology to an amino acid sequence of CD40, CD47, DEC-205, CD36 mannose scavenger receptor 1, CLEC9A, DC-SIGN, CLEC12A, BDCA-2, OX40L, 41BBL, CD204, MARCO, CLEC5A, Dectin 1, Dectin 2, CLEC10A, CD206, CD64, CD32A, CD16A, HVEM, PD-L1, or CD32B The second binding domain of the fusion peptide can specifically bind to an antigen having an amino acid sequence with at least 80% or 100% homology to an amino acid sequence of CD40, CD47, DEC-205, CD36 mannose scavenger receptor 1, CLEC9A, DC-SIGN, CLEC12A, BDCA-2, OX40L, 41BBL, CD204, MARCO, CLEC5A, Dectin 1, Dectin 2, CLEC10A, CD206, CD64, CD32A, CD16A, HVEM, PD-L1, CD32B, TNFR2, or TREM2. The second binding domain of the fusion peptide can specifically bind to an antigen having an amino acid sequence with at least 80% or 100% homology to an amino acid sequence of CD40, DEC-205, CD36 mannose scavenger receptor 1, CLEC9A, DC-SIGN, CLEC12A, BDCA-2, OX40L, 41BBL, CD204, MARCO, CLEC5A, Dectin 1, Dectin 2, CLEC10A, CD206, CD64, CD32A, CD16A, HVEM, PD-L1, or CD32B. The second binding domain of the fusion peptide can specifically bind to an antigen having an amino acid sequence with at least 80% or 100% homology to an amino acid sequence of CD40, DEC-205, CD36 mannose scavenger receptor 1, CLEC9A, DC-SIGN, CLEC12A, BDCA-2, OX40L, 41BBL, CD204, MARCO, CLEC5A, Dectin 1, Dectin 2, CLEC10A, CD206, CD64, CD32A, CD16A, HVEM, PD-L1, CD32B, TNFR2, or TREM2. The first binding domain of the fusion peptide can target a tumor antigen. The first binding domain of the fusion peptide can target an antigen having an amino acid sequence with at least 80% or 100% homology to an amino acid sequence of HER2, EGFR, CMET, HER3, MUC1, MUC16, EPCAM, MSLN, CA6, NAPI2B, TROP2, CEA, CLDN18.2, EGFRvIII, FAP, EphA2, RON, LY6E, FRA, PSMA, DLL3, PTK7, LIV1, ROR1, MAGE-A3, or NY-ESO-1. The first binding domain of the fusion peptide also can target an antigen having an amino acid sequence with at least 80% or 100% homology to the amino acid sequence of HER2, EGFR, CMET, HER3, MUC1, MUC16, EPCAM, MSLN, CA6, NAPI2B, TROP2, CEA, CLDN18.2, EGFRvIII, FAP, EphA2, RON, LY6E, FRA, PSMA, DLL3, PTK7, LIV1, ROR1, MAGE-A3, NY-ESO-1, LRRC15, GLP-3, CLDN6, CLDN16, UPK1B, VTCN1 (B7-H4), or STRA6. In some embodiments, the first targeting domain can target an antigen having an amino acid sequence with at least 80% or 100% homology to the amino acid sequence of TROP2, CEA, MUC16, LRRC15, CLDN6, CLDN16, UPK1B, VTCN1 (B7-H4) or STRA6.

[0222] Alternatively, the second binding domain of the fusion peptide can target a tumor antigen. The second binding domain of the fusion peptide can target an antigen having an amino acid sequence with at least 80% or 100% homology to the amino acid sequence of HER2, EGFR, CMET, HER3, MUC1, MUC16, EPCAM, MSLN, CA6, NAPI2B, TROP2, CEA, CLDN18.2, EGFRvIII, FAP, EphA2, RON, LY6E, FRA, PSMA, DLL3, PTK7, LIV1, ROR1, MAGE-A3, or NY-ESO-1. The second binding domain of the fusion peptide also can target an antigen having an amino acid sequence with at least 80% or 100% homology to the amino acid sequence of HER2, EGFR, CMET, HER3, MUC1, MUC16, EPCAM, MSLN, CA6, NAPI2B, TROP2, CEA, CLDN18.2, EGFRvIII, FAP, EphA2, RON, LY6E, FRA, PSMA, DLL3, PTK7, LIV1, ROR1, MAGE-A3, NY-ESO-1, LRRC15, GLP-3, CLDN6, CLDN16, UPK1B, VTCN1 (B7-H4), or STRA6. The first binding domain of the fusion peptide can specifically bind to an antigen having an amino acid sequence with at least 80% homology to the amino acid sequence of CD40. The first binding domain of the fusion peptide can be a CD40 agonist. The first binding domain of the fusion peptide can specifically bind to an antigen having an amino acid sequence with at least 80% homology to the amino acid sequence of DEC-205. The first binding domain of the fusion peptide can specifically bind to an antigen having an amino acid sequence with at least 80% or 100% homology to the amino acid sequence of CD40, DEC-205, CD36 mannose scavenger receptor 1, CLEC9A, DC-SIGN, CLEC12A, BDCA-2, OX40L, 41BBL, CD204, MARCO, CLEC5A, Dectin 1, Dectin 2, CLEC10A, CD206, CD64, CD32A, CD16A, HVEM, PD-L1, or CD32B. The first binding domain of the fusion peptide can specifically bind to an antigen having an amino acid sequence with at least 80% homology to the amino acid sequence of DEC-205. The first binding domain of the fusion peptide can specifically bind to an antigen having an amino acid sequence with at least 80% or 100% homology to the amino acid sequence of CD40, DEC-205, CD36 mannose scavenger receptor 1, CLEC9A, DC-SIGN, CLEC12A, BDCA-2, OX40L, 41BBL, CD204, MARCO, CLEC5A, Dectin 1, Dectin 2, CLEC10A, CD206, CD64, CD32A, CD16A, HVEM, PD-L1, CD32B, TNFR2, or TREM2.

[0223] In some embodiments, the first binding domain can specifically bind to an antigen having an amino acid sequence with at least 80% or 100% homology to the amino acid sequence of TROP2, CEA, MUC16, LRRC15, CLDN6, CLDN16, UPK1B, VTCN1 (B7-H4) and STRA6 and a second binding domain can target an antigen having an amino acid sequence with at least 80% or 100% homology to the amino acid sequence of CD40 or PD-L1.

[0224] A conjugate or antibody construct can comprise a first binding domain, a second binding domain, and a third binding domain. A conjugate or antibody construct can comprise a first binding domain, a second binding domain, a third binding domain, and an Fc domain. The first binding domain and the second binding domain can be attached to the Fc domain. The first and second binding domains are described herein throughout the specification. The first binding domain can be attached to the Fc domain at an N-terminal end of the Fc domain. The second binding domain can be attached at a C-terminal end of the Fc domain. The second binding domain can be attached at a C-terminal end of the Fc domain via a polypeptide linker having a length of 10 to 25 amino acid comprising the sequence [G4S]n where n=2 to 5 (SEQ ID NO: 1330). The third binding domain can be attached to a C-terminal end of the first binding domain. The third binding domain can be attached at a C-terminal end of the Fc domain via a polypeptide linker having a length of 10 to 25 amino acid comprising the sequence [G4S]n where n=2 to 5 (SEQ ID NO: 1330). The third binding domain can be attached to a C-terminal end of a light chain of the first binding domain. One or more of the first binding domain, the second binding domain, the third binding domain, and the Fc domain can be attached as a fusion peptide. The first binding domain can comprise a Fab fragment comprising a light chain, wherein the second binding domain is attached at a C-terminal end of the light chain as a fusion peptide. The second binding domain of the fusion peptide can comprise a single chain variable fragment (scFv). The second binding domain of the fusion peptide can be attached to the Fc domain at a heavy chain variable domain of the single chain variable fragment of the second binding domain (HL orientation). The second binding domain of the fusion peptide can be attached to the Fc domain at a light chain variable domain of the single chain variable fragment of the second binding domain (LH orientation). The third binding domain of the fusion peptide can comprise a single chain variable fragment (scFv). The conjugate or antibody construct can comprise a fusion peptide comprising the third binding domain attached to the first binding domain having at least 80% or 100% sequence identity to any sequence in TABLE 18 or TABLE 19. The third binding domain of the fusion peptide can be attached to the first binding domain at a heavy chain variable domain of the single chain variable fragment of the first binding domain (HL orientation). Alternatively, the third binding domain of the fusion peptide can be attached to the first binding domain at a light chain variable domain of the single chain variable fragment of the first binding domain (LH orientation). The third binding domain of the fusion peptide can target an antigen of an immune cell, such as an antigen presenting cell, (APC). The third binding domain of the fusion peptide can specifically bind to an antigen with at least 80% homology to the amino acid sequence of CD40. The third binding domain of the fusion peptide can be a CD40 agonist. The third binding domain of the fusion peptide can specifically bind to an antigen with at least 80% homology to the amino acid sequence of DEC-205. The third binding domain of the fusion peptide can specifically bind to an antigen having an amino acid sequence with at least 80% homology to the amino acid sequence of CD40, DEC-205, CD36 mannose scavenger receptor 1, CLEC9A, DC-SIGN, CLEC12A, BDCA-2, OX40L, 41BBL, CD204, MARCO, CLEC5A, Dectin 1, Dectin 2, CLEC10A, CD206, CD64, CD32A, CD16A, HVEM, PD-L1, or CD32B. The third binding domain of the fusion peptide can specifically bind to an antigen having an amino acid sequence with at least 80% homology to the amino acid sequence of CD40, DEC-205, CD36 mannose scavenger receptor 1, CLEC9A, DC-SIGN, CLEC12A, BDCA-2, OX40L, 41BBL, CD204, MARCO, CLEC5A, Dectin 1, Dectin 2, CLEC10A, CD206, CD64, CD32A, CD16A, HVEM, PD-L1, CD32B, TNFR2, or TREM2.

[0225] Alternatively, the third binding domain can target a tumor antigen. The third binding domain of the fusion peptide can target an antigen having an amino acid sequence with at least 80% or 100% homology to the amino acid sequence of HER2, EGFR, CMET, HER3, MUC1, MUC16, EPCAM, MSLN, CA6, NAPI2B, TROP2, CEA, CLDN18.2, EGFRvIII, FAP, EphA2, RON, LY6E, FRA, PSMA, DLL3, PTK7, LIV1, ROR1, MAGE-A3, or NY-ESO-1. The third binding domain of the fusion peptide can target an antigen having an amino acid sequence with at least 80% or 100% homology to the amino acid sequence of HER2, EGFR, CMET, HER3, MUC1, MUC16, EPCAM, MSLN, CA6, NAPI2B, TROP2, CEA, CLDN18.2, EGFRvIII, FAP, EphA2, RON, LY6E, FRA, PSMA, DLL3, PTK7, LIV1, ROR1, MAGE-A3, NY-ESO-1, LRRC15, GLP-3, CLDN6, CLDN16, UPK1B, VTCN1 (B7-H4), or STRA6.

[0226] A conjugate or antibody construct can comprise a first binding domain targeting CD40 and a second binding domain targeting DEC-205. Alternatively, a conjugate or antibody construct can comprise a first binding domain targeting DEC-205 and a second binding domain targeting CD40. A conjugate or antibody construct can comprise a first binding domain, a second binding domain, and an Fc domain. The first binding domain and the second binding domain can be attached to the Fc domain. The first binding domain can be attached to the Fc domain at an N-terminal end of the Fc domain, wherein the second binding domain is attached to the Fc domain at a C-terminal end of the Fc domain. Alternatively, second binding domain can be attached to the Fc domain at an N-terminal end of the Fc domain, wherein the first binding domain is attached to the Fc domain at a C-terminal end of the Fc domain. A conjugate or antibody construct can comprise a fusion peptide comprising a first binding domain targeting CD40 and a second binding domain targeting DEC-205. The fusion peptide can comprise at least 80% or 100% sequence identity to any sequence in TABLE 20.

[0227] Additionally, conjugates or antibody constructs containing the sequences referenced in TABLES 3-20 can have a dissociation constant (Kd) that is less than 10 nM for the antigen of the first binding domain. The conjugates or antibody constructs containing the sequences referenced in TABLES 3-20 can have a dissociation constant (Kd) that is less than 10 nM for the antigen of the second binding domain. The conjugates or antibody constructs containing the sequences referenced in TABLES 3-20 can have a dissociation constant (Kd) that is less than 10 nM for the antigen of the third binding domain. The conjugates or antibody constructs can have a dissociation constant (Kd) for the antigen of the first binding domain that is less than 1 nM, less than 100 pM, less than 10 pM, less than 1 pM, or less than 0.1 pM. The conjugates or antibody constructs can have a dissociation constant (Kd) for the antigen of the second binding domain that is less than 1 nM, less than 100 pM, less than 10 pM, less than 1 pM, or less than 0.1 pM. The conjugates or antibody constructs can have a dissociation constant (Kd) for the antigen of the third binding domain that is less than 1 nM, less than 100 pM, less than 10 pM, less than 1 pM, or less than 0.1 pM.

[0228] An anti-CD40 light chain can be expressed with its corresponding anti-CD40 heavy chain or fragment thereof. The corresponding anti-CD40 heavy chain or fragment thereof can be a heavy chain or fragment that when paired with the anti-CD40 light chain, can bind to a CD40 antigen. The anti-CD40 light chain can also be expressed with its corresponding anti-CD40 heavy chain or fragment thereof to form an anti-CD40 antibody or fragment thereof. The anti-CD40 antibody or fragment thereof can be purified, and can be combined with a pharmaceutically acceptable carrier.

[0229] An anti-DEC-205 light chain can be expressed with its corresponding anti-DEC-205 heavy chain or fragment thereof. The corresponding anti-DEC-205 heavy chain or fragment thereof can be a heavy chain or fragment that when paired with the anti-DEC-205 light chain, can bind to a DEC-205 antigen. The anti-DEC-205 light chain can also be expressed with its corresponding anti-DEC-205 heavy chain or fragment thereof to form an anti-DEC-205 antibody or fragment thereof. The anti-DEC-205 antibody or fragment thereof can be purified, and can be combined with a pharmaceutically acceptable carrier.

[0230] An anti-tumor antigen light chain can be expressed with an anti-tumor antigen heavy chain or fragment thereof. The anti-tumor antigen light chain can also expressed with an anti-tumor antigen heavy chain or fragment thereof to form an anti-tumor antigen antibody or fragment thereof. The anti-tumor antibody or fragment thereof can be purified, and can be combined with a pharmaceutically acceptable carrier.

[0231] A conjugate or antibody construct can comprise an antibody heavy chain. A heavy chain can be a heavy chain of an anti-CD40 antibody which can bind to a CD40 antigen. A heavy chain of an anti-CD40 antibody can be an IgG isotype. A heavy chain of an anti-CD40 antibody can be dacetuzumab.

[0232] A conjugate or antibody construct can comprise an antibody light chain. A light chain can be a light chain of an anti-CD40 antibody which can bind to a CD40 antigen. A light chain of an anti-CD40 antibody can be dacetuzumab.

[0233] A conjugate or antibody construct can comprise an antibody heavy chain. A heavy chain can be a heavy chain of an anti-CD40 antibody which can bind to a CD40 antigen. A heavy chain of an anti-CD40 antibody can be an IgG4 isotype. A heavy chain of an anti-CD40 antibody can be bleselumab.

[0234] A conjugate or antibody construct can comprise an antibody light chain. A light chain can be a light chain of an anti-CD40 antibody which can bind to a CD40 antigen. A light chain of an anti-CD40 antibody can be bleselumab.

[0235] A conjugate or antibody construct can comprise an antibody heavy chain. A heavy chain can be a heavy chain of an anti-CD40 antibody which can bind to a CD40 antigen. A heavy chain of an anti-CD40 antibody can be an IgG isotype. A heavy chain of an anti-CD40 antibody can be lucatumumab.

[0236] A conjugate or antibody construct can comprise an antibody light chain. A light chain can be a light chain of an anti-CD40 antibody which can bind to a CD40 antigen. A light chain of an anti-CD40 antibody can be lucatumumab.

[0237] A conjugate or antibody construct can comprise an antibody heavy chain. A heavy chain can be a heavy chain of an anti-CD40 antibody which can bind to a CD40 antigen. A heavy chain of an anti-CD40 antibody can be an IgG isotype. A heavy chain of an anti-CD40 antibody can be ADC-1013.

[0238] A conjugate or antibody construct can comprise an antibody light chain. A light chain can be a light chain of an anti-CD40 antibody which can bind to a CD40 antigen. A light chain of an anti-CD40 antibody can be ADC-1013.

[0239] A conjugate or antibody construct can comprise an antibody heavy chain. A heavy chain can be a heavy chain of an anti-CD40 antibody which can bind to a CD40 antigen. A heavy chain of an anti-CD40 antibody can be the humanized rabbit antibody APX005.

[0240] A conjugate or antibody construct can comprise an antibody light chain. A light chain can be a light chain of an anti-CD40 antibody which can bind to a CD40 antigen. A light chain of an anti-CD40 antibody can be the humanized rabbit antibody APX005.

[0241] A conjugate or antibody construct can comprise an antibody heavy chain. A heavy chain can be a heavy chain of an anti-CD40 antibody which can bind to a CD40 antigen. A heavy chain of an anti-CD40 antibody can be Chi Lob 7/4.

[0242] A conjugate or antibody construct can comprise an antibody light chain. A light chain can be a light chain of an anti-CD40 antibody which can bind to a CD40 antigen. A light chain of an anti-CD40 antibody can be Chi Lob 7/4.

[0243] A conjugate or antibody construct can comprise an antibody heavy chain. A heavy chain can be a heavy chain of an anti-CD40 antibody which can bind to a CD40 antigen. A heavy chain of an anti-CD40 antibody can be an IgG isotype. A heavy chain of an anti-CD40 antibody can be SBT-040-G1WT.

[0244] A conjugate or antibody construct can comprise an antibody heavy chain. A heavy chain can be a heavy chain of an anti-CD40 antibody which can bind to a CD40 antigen. A heavy chain of an anti-CD40 antibody can be an IgG isotype. A heavy chain of an anti-CD40 antibody can be SBT-040 VH-hIgG1 wt.

[0245] A heavy chain of an anti-CD40 antibody can be an IgG2 isotype. A heavy chain of an anti-CD40 antibody can be SBT-040-G2.

[0246] A conjugate or antibody construct can comprise an antibody with modifications occurring at least at one amino acid residue. Modifications can be substitutions, additions, mutations, deletions, or the like. An antibody modification can be an insertion of an unnatural amino acid.

[0247] A conjugate or antibody construct can comprise a light chain of an amino acid sequence having at least one, two, three, four, five, six, seven, eight, nine or ten modifications but not more than 40, 35, 30, 25, 20, 15 or 10 modifications of the amino acid sequence relative to the natural or original amino acid sequence. A conjugate or antibody construct can comprise a heavy chain of an amino acid sequence having at least one, two, three, four, five, six, seven, eight, nine or ten modifications but not more than 40, 35, 30, 25, 20, 15 or 10 modifications of the amino acid sequence relative to the natural or original amino acid sequence. A heavy chain can be the heavy chain of an anti-CD40 antibody which can bind to the CD40 antigen.

[0248] A conjugate or antibody construct can comprise an Fc domain of an IgG isotype. A conjugate or antibody construct can comprise an Fc domain of an IgG2 isotype. A conjugate or antibody construct can comprise an Fc domain of an IgG3 isotype. A conjugate can comprise an Fc domain of an IgG4 isotype. A conjugate or antibody construct can have a hybrid isotype comprising constant regions from two or more isotypes. A conjugate or antibody construct can be an anti-CD40 antibody, in which the anti-CD40 antibody can be a monoclonal human antibody comprising a wild-type sequence of an IgG isoform, in particular, at an Fc region of the antibody.

[0249] Conjugates and antibody constructs disclosed herein can be non-natural, designed, and/or engineered. Conjugates and antibody constructs disclosed herein can be non-natural, designed, and/or engineered scaffolds comprising an antigen binding domain. Conjugates and antibody constructs disclosed herein can be non-natural, designed, and/or engineered antibodies. Conjugates and antibody constructs can include monoclonal antibodies. Conjugates and antibody constructs can comprise human antibodies. Conjugates and antibody constructs can comprise humanized antibodies. Conjugates and antibody constructs can comprise monoclonal humanized antibodies. Conjugates and antibody constructs can comprise recombinant antibodies.

[0250] The Kd for binding of the Fc domain to an Fc receptor of a conjugate or antibody construct as described herein can increase when the tumor antigen binding domain is bound to its tumor antigen as compared to the Kd for binding of the Fc domain to an Fc receptor of a conjugate or antibody construct as described herein when the tumor antigen binding domain is not bound to its tumor antigen. For example, a conjugate or antibody construct as described herein can have a Kd for binding of the Fc domain to an Fc receptor in the presence of the binding domain that binds to a molecule on an immune cell, such as an antigen presenting cell, and the tumor targeting binding domain when the tumor targeting binding domain is bound to its tumor antigen that can be greater than or greater than about 100 nM. The Kd for binding of the Fc domain to an Fc receptor in the presence of the binding domain that binds to a molecule on an immune cell, such as an antigen presenting cell, and the tumor targeting binding domain when the tumor targeting binding domain is bound to its tumor antigen can be or can be about 100 nM, 200 nM, 300 nM, 400 nM, 500 nM, or 1000 nM. The Kd for binding of the Fc domain to an Fc receptor in the presence of the binding domain that binds to a molecule on an immune cell, such as an antigen presenting cell, and the tumor targeting binding domain when the tumor targeting binding domain is bound to its tumor antigen can be from 100 nM to 200 nM, 100 nM to 300 nM, 100 nM to 400 nM, 100 nM to 500 nM, or 100 nM to 1000 nM. Additionally, the conjugate or antibody construct as described herein can have a Kd for binding of the Fc domain to an Fc receptor in the presence of the binding domain that binds to a molecule on an immune cell, such as an antigen presenting cell, and a tumor antigen binding domain when the tumor antigen binding domain is not bound to the tumor antigen is no greater than about 100 nM and is no greater than about 100 times a Kd for binding of the Fc domain to the Fc receptor in an absence of the binding domain that binds to a molecule on an immune cell, such as an antigen presenting cell, and a tumor antigen binding domain.

[0251] The Kd for binding of the binding domain that binds to a molecule on an immune cell, such as an antigen presenting cell, of a conjugate or antibody construct as described herein can increase when the tumor antigen binding domain is bound to its tumor antigen as compared to the Kd for binding of the binding domain that binds to a molecule on an immune cell, such as an antigen presenting cell, of a conjugate or antibody construct as described herein when the tumor antigen binding domain is not bound to its tumor antigen. For example, a conjugate or antibody construct as described herein can comprise a Kd for binding of the binding domain that binds to a molecule on an immune cell, such as an antigen presenting cell, when the tumor antigen binding domain is bound to its tumor antigen can be greater than or greater than about 100 nM. The Kd for binding of the binding domain that binds to a molecule on an immune cell, such as an antigen presenting cell, when the tumor antigen binding domain is bound to its tumor antigen can be or can be about 100 nM, 200 nM, 300 nM, 400 nM, 500 nM, or 1000 nM. Kd for binding of the binding domain that binds to a molecule on an immune cell, such as an antigen presenting cell, when the tumor antigen binding domain is bound to its tumor antigen can be from 100 nM to 200 nM, 100 nM to 300 nM, 100 nM to 400 nM, 100 nM to 500 nM, or 100 nM to 1000 nM.

[0252] The effect of the tumor antigen binding domain and the binding domain that binds to a molecule on the immune cell, such as an antigen presenting cell, together can be to cluster the conjugates or antibody constructs on cells expressing tumor antigen, and thus clustering immune cells such as an antigen presenting cells around cancerous cells and at tumor sites resulting in activation of the immune cell effector functions or antigen presenting cell effector functions. This can include the activation of the molecule on the immune cell, such as an antigen presenting cell, when a bispecific tumor targeting antibody construct or conjugate is bound to its tumor antigen, such as activation of CD40, DEC-205, CD36 mannose scavenger receptor 1, DC-SIGN, CLEC9A, CLEC12A, BDCA-2, OX40L, 41BBL, CD204, MARCO, CLEC5A, Dectin 1, Dectin 2, CLEC10A, CD206, CD64, CD32A, CD16A, HVEM, PD-L1, CD32B, or CD47. This can include the activation of the molecule on the immune cell, such as an antigen presenting cell, when a bispecific tumor targeting antibody construct or conjugate is bound to its tumor antigen, such as activation of CD40, DEC-205, CD36 mannose scavenger receptor 1, DC-SIGN, CLEC9A, CLEC12A, BDCA-2, OX40L, 41BBL, CD204, MARCO, CLEC5A, Dectin 1, Dectin 2, CLEC10A, CD206, CD64, CD32A, CD16A, HVEM, PD-L1, CD32B, CD47, TNFR2, or TREM2. In some embodiments, this activation of the molecule on the immune cell, such as an antigen presenting cell, only occurs when the bispecific tumor targeting antibody construct or conjugate is bound to its tumor antigen. An immune cell effector function or antigen presenting cell effector function can include antibody dependent cellular cytotoxicity (ADCC) of the tumor antigen expressing cell, which can occur when the bispecific tumor targeting conjugate is bound to its tumor antigen. In some embodiments, ADCC of the tumor antigen expressing cell only occurs with the bispecific tumor targeting antibody construct or conjugate is bound to its tumor antigen. An immune cell effector function or antigen presenting cell effector function can include antibody dependent cellular phagocytosis (ADCP) of the tumor antigen expressing cell, which can occur when the bispecific tumor targeting conjugate is bound to its tumor antigen. In some embodiments, ADCP of the tumor antigen expressing cell only occurs with the bispecific tumor targeting antibody construct or conjugate is bound to its tumor antigen. In certain embodiments, a bispecific tumor targeting antibody construct or conjugate density of greater than 1000, 2000, 3000, 4000, 5000, 6000, 7000, 8000, 9000, 10,000 or more per cell, resulting from the bispecific tumor targeting antibody construct or conjugate binding to the tumor antigen, induces signaling in the immune cell such as an antigen presenting cell. Signaling can suitably be measured in vitro using a cell line expressing the tumor antigen bound by the target antigen binding domain, and primary antigen presenting cells or other immune cells isolated from a human subject. Signaling can be assessed as cytokine release, chemokine release, or increased expression of cell surface markers. Cytokine release can be measured by a cytokine release assay. Chemokine release can be measured by an ELISA immunoassay. Expression of cell surface markers can be measured by Fluorescent-Activated Cell Sorting (FACS). In certain embodiments, a bispecific tumor targeting conjugate density of greater than 1000, 2000, 3000, 4000, 5000, 6000, 7000, 8000, 9000, 10,000 or more per cell, resulting from the bispecific tumor targeting antibody construct or conjugate binding to the tumor antigen, induces ADCC of the cells expressing tumor antigen. ADCC can suitably be measured in vitro using a cell line expressing the tumor antigen bound by the target antigen binding domain, and cells such as NK cells and/or macrophages isolated from a human subject. ADCC can be determined by the frequency of remaining tumor antigen expressing cells in the co-culture. ADCP can be measured by an ADCP assay, which can be determined by the frequency of remaining tumor antigen expressing cells in the co-culture.

[0253] In some embodiments, the bispecific tumor targeting antibody constructs or conjugates as described herein can specifically bind to a tumor antigen in a cluster of bispecific tumor targeting antibody constructs or conjugates, and this clustering can induce a signal in an immune cell such as an antigen presenting cell. The bispecific tumor targeting antibody constructs or conjugates as described herein can specifically bind to a tumor antigen in a cluster of bispecific tumor targeting antibody constructs or conjugates, and this clustering can induce antibody dependent cellular cytotoxicity. The bispecific tumor targeting antibody constructs or conjugates as described herein can specifically bind to a tumor antigen in a cluster of bispecific tumor targeting antibody constructs or conjugates and this clustering can result in an increased avidity for a molecule on an immune cell such as an antigen presenting cell. The bispecific tumor targeting antibody constructs or conjugates as described herein can specifically bind to a tumor antigen in a cluster of bispecific tumor targeting antibody constructs or conjugates and this clustering can result in an increased avidity of the Fc domain for an Fc receptor.

[0254] Sequences that can be used to produce antibodies for the antibody constructs and conjugates can comprise leader sequences. Leader sequences can be signal sequences. Leader sequences useful with the antibody constructs and conjugates and methods described herein can include, but are not limited to, an amino acid sequence comprising SEQ ID NO: 847, SEQ ID NO: 848, and SEQ ID NO: 849.

[0255] A binding domain of a antibody construct or conjugate can be selected in order to recognize an antigen or molecule. For example, an antigen can be a cell surface marker on target cells associated with a disease or condition. An antigen can be expressed on an immune cell. An antigen can be a peptide or fragment thereof. An antigen can be expressed on an antigen presenting cell. An antigen can be expressed on a T cell, NK cell, NKT cell, dendritic cell, a macrophage, or a B cell. An antigen on an immune cell, such as an antigen presenting cell, can be a cell lineage marker or a cell surface protein expressed preferentially on immune cells such as an antigen presenting cells or a subset of immune or antigen presenting cells. An antigen can be a peptide presented in a major histocompatibility complex by cell. As another example, a cell surface marker recognized by the antigen binding domain can include macromolecules associated with viral and bacterial diseases or infections, autoimmune diseases and cancerous diseases. An antigen can be CD40 and an antigen binding domain can recognize a CD40 antigen.

[0256] An antigen can be a tumor antigen or fragment thereof. A tumor antigen can be GD2, GD3, GM2, Ley, polysialic acid, fucosyl GM1, GM3, Tn, STn, sLe(animal), or GloboH. A tumor antigen can be any antigen listed on tumor antigen databases, such as TANTIGEN, or peptide databases for T cell-defined tumor antigens, such as the Cancer Immunity Peptide database. A tumor antigen can also be any antigen listed in the review by Chen (Chen, Cancer Immun 2004 [updated 2004 Mar. 10; cited 2004 Apr. 1]). Note that the ‘antibody’ can recognize the ‘tumor antigen’ or a peptide derived thereof, bound to an MHC molecule. An antigen can be or can be at least 80% homologous to an amino acid sequence of CD5, CD19, CD20, CD25, CD37, CD30, CD33, CD45, CAMPATH-1, BCMA, CS-1, PD-L1, B7-H3, B7-DC, HLA-DR, carcinoembryonic antigen (CEA), TAG-72, EpCAM, MUC1, folate-binding protein, A33, G250, prostate-specific membrane antigen (PSMA), ferritin, CA-125, CA19-9, epidermal growth factor, p185HER2, IL-2 receptor, EGFRvIII (de2-7), EGFR, fibroblast activation protein, tenascin, a metalloproteinase, endosialin, vascular endothelial growth factor, αvβ3, WT1, LMP2, HPV E6, HPV E7, Her-2/neu, p53 nonmutant, NY-ESO-1, MelanA/MART1, Ras mutant, gp100, p53 mutant, PR1, bcr-abl, tyrosinase, survivin, PSA, hTERT, a Sarcoma translocation breakpoint fusion protein, EphA2, PAP, ML-IAP, AFP, ERG, NA17, PAX3, ALK, androgen receptor, cyclin B1, MYCN, RhoC, TRP-2, mesothelin, PSCA, MAGE A1, MAGE A3, CYP1B1, PLAV1, BORIS, ETV6-AML, NY-BR-1, RGS5, SART3, Carbonic anhydrase IX, PAX5, OY-TES1, Sperm protein 17, LCK, HMWMAA, AKAP-4, SSX2, XAGE 1, B7H3, Legumain, Tie 3, PAGE4, VEGFR2, MAD-CT-1, PDGFR-B, MAD-CT-2, ROR2, TRAIL1, MUC16, MAGE A4, MAGE C2, GAGE, EGFR, CMET, HER3, MUC1, CA6, NAPI2B, TROP2, CLDN6, CLDN16, CLDN18.2, RON, LY6E, FRA, DLL3, PTK7, UPK1B, VTCN1 (B7-H4), STRA6, TMPRSS3, TMRRSS4, TMEM238, C1orf186, LIV1, ROR1, Fos-related antigen 1, VEGFR1, endoglin, VISTA, LLRC15, or a fragment thereof. An antigen binding domain can be capable of recognizing a single antigen. An antigen binding domain can be capable of recognizing two or more different antigens.

[0257] An antibody construct or conjugate can comprise an Fc region with an Fc domain. An Fc domain is a structure that can bind to Fc receptors. An antibody construct or conjugate can comprise an Fc domain. Fc domains can be bound by Fc receptors (FcRs). Fc domains can be from antibodies. An Fc domain can be at least 80% homologous to an Fc domain from an antibody. An Fc region can be in a scaffold. An Fc region with an Fc domain can be in an antibody scaffold. An Fc region with an Fc domain can be in a non-antibody scaffold. An antibody construct or conjugate can comprise an Fc region with an Fc domain in an antibody scaffold. An antibody construct or conjugate can comprise an Fc region with an Fc domain in a non-antibody scaffold. An Fc domain can be in a scaffold. An Fc domain can be in an antibody scaffold. An Fc domain can be in a non-antibody scaffold. An antibody construct or conjugate can comprise an Fc domain in an antibody scaffold. An antibody construct or conjugate can comprise an Fc domain in a non-antibody scaffold. Fc domains of antibodies, including those of the present disclosure, can be bound by Fc receptors (FcRs). Fc domains can be a portion of the Fc region of an antibody. FcRs can bind to an Fc domain of an antibody. FcRs can bind to an Fc domain of an antibody bound to an antigen. FcRs can be organized into classes (e.g., gamma (γ), alpha (α) and epsilon (ε)) based on the class of antibody that the FcR recognizes. The FcαR class can bind to IgA and includes several isoforms, FcαRI (CD89) and FcαμR. The FcγR class can bind to IgG and includes several isoforms, FcγRI (CD64), FcγRIIA (CD32a), FcγRIIB (CD32b), FcγRIIIA (CD16a), and FcγRIIIB (CD16b). An FcγRIIIA (CD16a) can be an FcγRIIIA (CD16a) F158 variant. An FcγRIIIA (CD16a) can be an FcγRIIIA (CD16a) V158 variant. Each FcγR isoform can differ in affinity to the Fc region of the IgG antibody. For example, FcγRI can bind to IgG with greater affinity than FcγRII or FcγRIII. The affinity of a particular FcγR isoform to IgG can be controlled, in part, by a glycan (e.g., oligosacccharaide) at position CH2 84.4 of the IgG antibody. For example, fucose containing CH2 84.4 glycans can reduce IgG affinity for FcγRIIIA. In addition, G0 glucans can have increased affinity for FcγRIIIA due to the lack of galactose and terminal GlcNAc moiety.

[0258] Binding of an Fc domain to an FcR can enhance an immune response. FcR-mediated signaling that can result from an Fc region binding to an FcR can lead to the maturation of immune cells. FcR-mediated signaling that can result from an Fc domain binding to an FcR can lead to the maturation of dendritic cells. FcR-mediated signaling that can result from an Fc domain binding to an FcR can lead to antibody dependent cellular cytotoxicity. FcR-mediated signaling that can result from an Fc domain binding to an FcR can lead to more efficient immune cell antigen uptake and processing. FcR-mediated signaling that can result from an Fc region binding to an FcR can lead to more efficient dendritic cell antigen uptake and processing. FcR-mediated signaling that can result from an Fc region binding to an FcR can increase antigen presentation. FcR-mediated signaling that can result from an Fc region binding to an FcR can increase antigen presentation by immune cells. FcR-mediated signaling that can result from an Fc region binding to an FcR can increase antigen presentation by antigen presenting cells. FcR-mediated signaling that can result from an Fc domain binding to an FcR can increase antigen presentation by dendritic cells. FcR-mediated signaling that can result from an Fc domain binding to an FcR can promote the expansion and activation of T cells. FcR-mediated signaling that can result from an Fc domain binding to an FcR can promote the expansion and activation of CD8+ T cells. FcR-mediated signaling that can result from an Fc domain binding to an FcR can influence immune cell regulation of T cell responses. FcR-mediated signaling that can result from an Fc domain binding to an FcR can influence immune cell regulation of T cell responses. FcR-mediated signaling that can result from an Fc domain binding to an FcR can influence dendritic cell regulation of T cell responses. FcR-mediated signaling that can result from an Fc domain binding to an FcR can influence functional polarization of T cells (e.g., polarization can be toward a TH1 cell response).

[0259] The profile of FcRs on a DC can impact the ability of the DC to respond upon stimulation. For example, most DC can express both CD32A and CD32B, which can have opposing effects on IgG-mediated maturation and function of DCs: binding of IgG to CD32A can mature and activate DCs in contrast with CD32B, which can mediate inhibition due to phosphorylation of immunoreceptor tyrosine-based inhibition motif (ITIM), after CD32B binding of IgG. Therefore, the activity of these two receptors can establish a threshold of DC activation. Furthermore, difference in functional avidity of these receptors for IgG can shift their functional balance. Hence, altering the Fc domain binding to FcRs can also shift their functional balance, allowing for manipulation (either enhanced activity or enhanced inhibition) of the DC immune response.

[0260] A modification in the amino acid sequence Fc domain can alter the recognition of an FcR for the Fc domain. However, such modifications can still allow for FcR-mediated signaling. A modification can be a substitution of an amino acid at a residue (e.g., wildtype) for a different amino acid at that residue. A modification can permit binding of an FcR to a site on the Fc region that the FcR may not otherwise bind to. A modification can increase binding affinity of an FcR to the Fc domain that the FcR may have reduced binding affinity for. A modification can decrease binding affinity of an FcR to a site on the Fc domain that the FcR may have increased binding affinity for. A modification can increase the subsequent FcR-mediated signaling after Fc binding to an FcR.

[0261] An antibody construct or conjugate can comprise an Fc region with at least one amino acid change as compared to the sequence of the wild-type Fc region. An antibody construct or conjugate can comprise an Fc domain with at least one amino acid change as compared to the sequence of the wild-type Fc domain. An amino acid change in an Fc region can allow the antibody construct or conjugate to bind to at least one Fc receptor with greater affinity compared to a wild-type Fc region. An amino acid change in an Fc domain can allow the antibody to bind to at least one Fc receptor with greater affinity compared to a wild-type Fc domain. An Fc region can comprise an amino acid sequence having at least one, two, three, four, five, six, seven, eight, nine or ten modifications but not more than 40, 35, 30, 25, 20, 15 or 10 modifications of the amino acid sequence relative to the natural or original amino acid sequence. An Fc domain can comprise an amino acid sequence having at least one, two, three, four, five, six, seven, eight, nine or ten modifications but not more than 40, 35, 30, 25, 20, 15 or 10 modifications of the amino acid sequence relative to the natural or original amino acid sequence. An Fc region can be an Fc region of an anti-CD40 antibody. An Fc domain can be an Fc domain of an anti-CD40 antibody. An Fc region can contain an Fc domain. An Fc region can be an Fc domain.

[0262] An antibody construct or conjugate can comprise an antibody comprising a sequence of the IgG isoform that has been modified from the wildtype IgG sequence. A modification can comprise a substitution at one or more one amino acid residues of an Fc domain such as at 5 different amino acid residues including L235V/F243L/R292P/Y300L/P396L (IgG1VLPLL). The numbering of amino acids residues described herein can be according to the EU index. This modification can be located in a portion of an antibody sequence which can encode an Fc region of the antibody and in particular, can be located in portions of the Fc region that can bind to Fc receptors (i.e., the Fc domain). A modification can comprise a substitution at one or more amino acid residues such as at 2 different amino acid residues of an Fc domain including S239D/I332E (IgG1DE). This modification can be located in a portion of an antibody sequence which encodes an Fc region of the antibody and in particular, are located in portions of the Fc region that can bind to Fc receptors (i.e., the Fc domain). A modification can comprise a substitution at one or more amino acid residues such as at 3 different amino acid residues of an Fc domain including S298A/E333A/K334A (IgG1AAA). The modification can be located in a portion of an antibody sequence which can encode an Fc region of the antibody and in particular, can be located in portions of the Fc region that can bind Fc receptors (i.e., the Fc domain).

[0263] An antibody construct or conjugate can comprise a monoclonal anti-CD40 human antibody comprising a sequence of the IgG isoform that has been modified from the wildtype IgG1 sequence. A modification can comprise a substitution at one or more one amino acid residues such as at 5 different amino acid residues of an Fc domain including L235V/F243L/R292P/Y300L/P396L (SBT-040-G1VLPLL). The numbering of amino acids residues described herein can be according to the EU index. This modification can be located in a portion of an antibody sequence which can encode an Fc region of the antibody and in particular, can be located in portions of the Fc region that can bind to Fc receptors (i.e., the Fc domain). A modification can comprise a substitution at one or more amino acid residues such as at 2 different amino acid residues of an Fc domain including S239D/I332E (SBT-040-G1DE). This modification can be located in a portion of an antibody sequence which encodes an Fc region of the antibody and in particular, are located in portions of the Fc region that can bind to Fc receptors (i.e., the Fc domain). A modification can comprise a substitution at one or more one amino acid residues such as at 3 different amino acid residues of an Fc domain including S298A/E333A/K334A (SBT-040-G1AAA). This modification can be located in a portion of an antibody sequence which can encode an Fc region of the antibody and in particular, can be located in portions of the Fc region that can bind Fc receptors (i.e., the Fc domain).

[0264] Binding of Fc receptors to an Fc region can be affected by amino acid substitutions. For example, SBT-040-VLPLL is an antibody with an amino acid sequence of a heavy chain of human anti-CD40 monoclonal antibody with modifications to a wild-type IgG Fc domain (L235V/F243L/R292P/Y300L/P396L). Binding of some Fc receptors to the Fc region of SBT-040-VLPLL can be enhanced compared to wild-type by as result of the L235V/F243L/R292P/Y300L/P396L amino acid modifications. However, binding of other Fc receptors to the Fc region of SBT-040-VLPLL can be reduced compared to wild-type by the L235V/F243L/R292P/Y300L/P396L amino acid modifications. For example, the binding affinities of SBT-040-VLPLL to FcγRIIIA and to FcγRIIA can be enhanced compared to wild-type whereas the binding affinity of SBT-040-VLPLL to FcγRIIB can be reduced compared to wild-type. SBT-040-DE antibody is an antibody with an amino acid sequence of a heavy chain of human anti-CD40 monoclonal antibody with modifications to a wild-type IgG1 Fc domain (S239D/I332E). Binding of Fc receptors to the Fc region of SBT-040-DE can be enhanced compared to wild-type as a result of the S239D/I332E amino acid modification. However, binding of some Fc receptors to the Fc region of SBT-040-G1DE can be reduced compared to wild-type by S239D/I332E amino acid modification. For example, the binding affinities of SBT-040-DE to FcγRIIIA and to FcγRIIB can be enhanced compared to wild-type. Binding of Fc receptors to an Fc region of are affected by amino acid substitutions. SBT-040-G1AAA antibody is an antibody with an amino acid sequence of a heavy chain of a human anti-CD40 monoclonal antibody with modifications to a wild-type IgG1 Fc domain (S298A/E333A/K334A). Binding of Fc receptors to an Fc region of SBT-040-G1AAA can be enhanced compared to wild-type as a result of the S298A/E333A/K334A amino acid modification. However, binding of some Fc receptors to the Fc region of SBT-040-G1AAA can be reduced compared to wild-type by S298A/E333A/K334A amino acid modification. Binding affinities of SBT-040-G1AAA to FcγRIIIA can be enhanced compared to wild-type whereas the binding affinity of SBT-040-G1AAA to FcγRIIB can be reduced compared to wildtype.

[0265] In some embodiments, the heavy chain of a human IgG2 antibody can be mutated at cysteines as positions 127, 232, or 233. In some embodiments, the light chain of a human IgG2 antibody can be mutated at a cysteine at position 214. The mutations in the heavy and light chains of the human IgG2 antibody can be from a cysteine residue to a serine residue.

[0266] While an antibody construct or conjugate of the present disclosure can comprise a first binding domain and a second binding domain (or, in some cases, a third binding domain) with wild-type or modified amino acid sequences encoding the Fc region or Fc domain, the modifications of the Fc region or the Fc domain from the wild-type sequence may not significantly alter binding and/or affinity of the binding domains. For example, binding and/or affinity of an antibody construct or conjugate comprising a first binding domain and a second binding domain (or, in some cases, a third binding domain) and having the Fc domain modifications of SBT-040-G1WT, SBT-040-G1VLPLL, SBT-040-G1DE, or SBT-040-G1AAA may not be significantly altered by modification of an Fc region or Fc domain amino acid sequence compared to a wild-type sequence. Modifications of an Fc region or Fc domain from a wild-type sequence may not alter binding and/or affinity of a first binding domain that binds, for example, to CD40 or DEC-205. Additionally, the binding and/or affinity of the binding domains described herein, for example a first binding domain, a second binding domain (or, in some cases, a third binding domain), and an Fc domain modification selected from SBT-040-G1WT, SBT-040-G1VLPLL, SBT-040-G1DE, and SBT-040-G1AAA, may be comparable to the binding and/or affinity of wild-type antibodies.

[0267] In some embodiments, a K_{d} for binding of the first binding domain to the tumor antigen in the presence of the immune-stimulatory compound is no greater than about two times, five times, ten times, or fifty times a K_{d} for binding of the first binding domain to the tumor antigen in an absence of the immune-stimulatory compound. In some embodiments, a Kd for binding of the second binding domain to the antigen on the antigen presenting cell in the presence of the immune-stimulatory compound is no greater than about two times, five times, ten times, or fifty times a Kd for binding of the second binding domain to the antigen on the antigen presenting cell in an absence of the immune-stimulatory compound. In some embodiments, a Kd for binding of the first binding domain to the tumor antigen is no greater than about 100 nM. In some embodiments, a Kd for binding of the second binding domain to the antigen on an antigen presenting cell is no greater than about 100 nM.

[0268] In some embodiments, a Kd for binding of the Fc domain to the Fc receptor in the presence of the immune-stimulatory compound is no greater than about two times, five times, ten times, or fifty times a Kd for binding of the Fc domain to the Fc receptor in an absence of the immune-stimulatory compound.

[0269] In some embodiments, the Fc domain is an Fc domain variant comprising at least one amino acid residue change as compared to a wild type sequence of the Fc domain.

[0270] In some embodiments, the Fc domain variant binds to an Fc receptor with altered affinity as compared to the wild type Fc domain.

[0271] In some embodiments, the at least one amino acid residue change is selected from a group consisting of: a) F243L, R292P, Y300L, L235V, and P396L, wherein numbering of amino acid residues in the Fc domain is according to the EU index; b) S239D and I332E, wherein numbering of amino acid residues in the Fc domain is according to the EU index; and c) S298A, E333A, and K334A, wherein numbering of amino acid residues in the Fc domain is according to the EU index.

[0272] In some embodiments, the antibody construct or conjugate induces secretion of cytokines by an immune cell as measured by a cytokine release assay. In some embodiments, the cytokine is IFN-γ, IL-8, IL-12, IL-2, or a combination thereof. In some embodiments, the antibody construct or conjugate induces antigen presentation on a dendritic cell, B cell, macrophage, or a combination thereof.

TABLE 3
Exemplary Tumor Antibody CDRs

| Antibody | Region | SEQ ID NO: |
|---|---|---|
| Nimotuzumab | HCDR1 | 52 |
| | HCDR2 | 53 |
| | HCDR3 | 54 |
| | LCDR1 | 57 |
| | LCDR2 | 58 |
| | LCDR3 | 59 |
| Zalutumumab | HCDR1 | 65 |
| | HCDR2 | 66 |
| | HCDR3 | 67 |
| | LCDR1 | 70 |
| | LCDR2 | 71 |
| | LCDR3 | 72 |
| Onartuzumab | HCDR1 | 78 |
| | HCDR2 | 79 |
| | HCDR3 | 80 |
| | LCDR1 | 83 |
| | LCDR2 | 84 |
| | LCDR3 | 85 |
| Patritumab | HCDR1 | 91 |
| | HCDR2 | 92 |
| | HCDR3 | 93 |
| | LCDR1 | 96 |
| | LCDR2 | 97 |
| | LCDR3 | 98 |
| Clivatuzumab | HCDR1 | 104 |
| | HCDR2 | 105 |
| | HCDR3 | 106 |
| | LCDR1 | 109 |
| | LCDR2 | 110 |
| | LCDR3 | 111 |
| Sofituzumab | HCDR1 | 117 |
| | HCDR2 | 118 |
| | HCDR3 | 119 |
| | LCDR1 | 122 |
| | LCDR2 | 123 |
| | LCDR3 | 124 |
| Edrecolomab | HCDR1 | 130 |
| | HCDR2 | 131 |
| | HCDR3 | 132 |
| | LCDR1 | 135 |
| | LCDR2 | 136 |
| | LCDR3 | 137 |
| Adecatumumab | HCDR1 | 143 |
| | HCDR2 | 144 |
| | HCDR3 | 145 |
| | LCDR1 | 148 |
| | LCDR2 | 149 |
| | LCDR3 | 150 |
| Anetumab | HCDR1 | 156 |
| | HCDR2 | 157 |
| | HCDR3 | 158 |
| | LCDR1 | 161 |
| | LCDR2 | 162 |
| | LCDR3 | 163 |
| huDS6 | HCDR1 | 169 |
| | HCDR2 | 170 |
| | HCDR3 | 171 |
| | LCDR1 | 174 |
| | LCDR2 | 175 |
| | LCDR3 | 176 |
| Lifastuzumab | HCDR1 | 182 |
| | HCDR2 | 183 |
| | HCDR3 | 184 |
| | LCDR1 | 187 |
| | LCDR2 | 188 |
| | LCDR3 | 189 |
| Sacituzumab | HCDR1 | 195 |
| | HCDR2 | 196 |
| | HCDR3 | 197 |
| | LCDR1 | 200 |
| | LCDR2 | 201 |
| | LCDR3 | 202 |
| PR1A3 | HCDR1 | 208 |
| | HCDR2 | 209 |
| | HCDR3 | 210 |
| | LCDR1 | 213 |
| | LCDR2 | 214 |
| | LCDR3 | 215 |
| Humanized PR1A3 | HCDR1 | 805 |
| | HCDR2 | 806 |
| | HCDR3 | 807 |
| | LCDR1 | 808 |
| | LCDR2 | 809 |
| | LCDR3 | 810 |
| Humanized Ab2-3 | HCDR1 | 823 |
| | HCDR2 | 824 |
| | HCDR3 | 825 |
| | LCDR1 | 826 |
| | LCDR2 | 827 |
| | LCDR3 | 828 |
| IMAB362, | HCDR1 | 221 |
| Claudiximab | HCDR2 | 222 |
| | HCDR3 | 223 |
| | LCDR1 | 226 |
| | LCDR2 | 227 |
| | LCDR3 | 228 |
| AMG595 | HCDR1 | 260 |
| | HCDR2 | 261 |
| | HCDR3 | 262 |
| | LCDR1 | 265 |
| | LCDR2 | 266 |
| | LCDR3 | 267 |
| ABT806 | HCDR1 | 273 |
| | HCDR2 | 274 |
| | HCDR3 | 275 |
| | LCDR1 | 278 |
| | LCDR2 | 279 |
| | LCDR3 | 280 |
| Sibrotuzumab | HCDR1 | 286 |
| | HCDR2 | 287 |
| | HCDR3 | 288 |
| | LCDR1 | 291 |
| | LCDR2 | 292 |
| | LCDR3 | 293 |
| DS-8895a variant 1 | HCDR1 | 299 |
| | HCDR2 | 300 |
| | HCDR3 | 301 |
| | LCDR1 | 304 |
| | LCDR2 | 305 |
| | LCDR3 | 306 |
| DS-8895a variant 2 | HCDR1 | 312 |
| | HCDR2 | 313 |
| | HCDR3 | 314 |
| | LCDR1 | 317 |
| | LCDR2 | 318 |
| | LCDR3 | 319 |
| Anti-EphA2 | HCDR1 | 325 |
| | HCDR2 | 326 |
| | HCDR3 | 327 |
| | LCDR1 | 330 |
| | LCDR2 | 331 |
| | LCDR3 | 332 |
| Narnatumab | HCDR1 | 338 |
| | HCDR2 | 339 |
| | HCDR3 | 340 |
| | LCDR1 | 343 |
| | LCDR2 | 344 |
| | LCDR3 | 345 |
| RG7841 | HCDR1 | 351 |
| | HCDR2 | 352 |
| | HCDR3 | 353 |
| | LCDR1 | 356 |
| | LCDR2 | 357 |
| | LCDR3 | 358 |
| Farletuzumab | HCDR1 | 364 |
| | HCDR2 | 365 |
| | HCDR3 | 366 |
| | LCDR1 | 369 |
| | LCDR2 | 370 |
| | LCDR3 | 371 |
| Mirvetuximab | HCDR1 | 377 |
| | HCDR2 | 378 |
| | HCDR3 | 379 |
| | LCDR1 | 382 |
| | LCDR2 | 383 |
| | LCDR3 | 384 |
| J591 variant 1 | HCDR1 | 390 |
| | HCDR2 | 391 |
| | HCDR3 | 392 |
| | LCDR1 | 395 |
| | LCDR2 | 396 |
| | LCDR3 | 397 |
| J591 variant 2 | HCDR1 | 403 |
| | HCDR2 | 404 |
| | HCDR3 | 405 |
| | LCDR1 | 408 |
| | LCDR2 | 409 |
| | LCDR3 | 410 |
| Rovalpituzumab | HCDR1 | 416 |
| | HCDR2 | 417 |
| | HCDR3 | 418 |
| | LCDR1 | 421 |
| | LCDR2 | 422 |
| | LCDR3 | 423 |
| PF-06647020 | HCDR1 | 429 |
| | HCDR2 | 430 |
| | HCDR3 | 431 |
| | LCDR1 | 434 |
| | LCDR2 | 435 |
| | LCDR3 | 436 |
| Anti-PTK7 | HCDR1 | 442 |
| | HCDR2 | 443 |
| | HCDR3 | 444 |
| | LCDR1 | 447 |
| | LCDR2 | 448 |
| | LCDR3 | 449 |
| Ladiratuzumab | HCDR1 | 455 |
| | HCDR2 | 456 |
| | HCDR3 | 457 |
| | LCDR1 | 460 |
| | LCDR2 | 461 |
| | LCDR3 | 462 |
| Cirmtuzumab | HCDR1 | 468 |
| | HCDR2 | 469 |
| | HCDR3 | 470 |
| | LCDR1 | 473 |
| | LCDR2 | 474 |
| | LCDR3 | 475 |
| anti-MAGE-A3 | HCDR1 | 481 |
| | HCDR2 | 482 |
| | HCDR3 | 483 |
| | LCDR1 | 486 |
| | LCDR2 | 487 |
| | LCDR3 | 488 |
| Anti-NY-ESO-1 | HCDR1 | 494 |
| | HCDR2 | 495 |
| | HCDR3 | 496 |
| | LCDR1 | 499 |
| | LCDR2 | 500 |
| | LCDR3 | 501 |

TABLE 4
Additional Exemplary Tumor Antibody CDRs

| Antibody | Region | SEQ ID NO: |
|---|---|---|
| Pertuzumab | HCDR1 | 13 |
| | HCDR2 | 14 |
| | HCDR3 | 15 |
| | LCDR1 | 18 |
| | LCDR2 | 19 |
| | LCDR3 | 20 |
| Trastuzumab | HCDR1 | 673 |
| | HCDR2 | 674 |
| | HCDR3 | 675 |
| | LCDR1 | 676 |
| | LCDR2 | 677 |
| | LCDR3 | 678 |
| Cetuximab | HCDR1 | 26 |
| | HCDR2 | 27 |
| | HCDR3 | 28 |
| | LCDR1 | 31 |
| | LCDR2 | 32 |
| | LCDR3 | 33 |
| Panitumumab | HCDR1 | 39 |
| | HCDR2 | 40 |
| | HCDR3 | 41 |
| | LCDR1 | 44 |
| | LCDR2 | 45 |
| | LCDR3 | 46 |

TABLE 5
Tumor Antibody V_{H} sequences and V_{L} sequences

| Antibody | Region | SEQ ID NO: |
|---|---|---|
| Nimotuzumab | V_{H} | 51 |
| | V_{L} | 56 |
| Zalutumumab | V_{H} | 64 |
| | V_{L} | 69 |
| Onartuzumab | V_{H} | 77 |
| | V_{L} | 82 |
| Patritumab | V_{H} | 90 |
| | V_{L} | 95 |
| Clivatuzumab | V_{H} | 103 |
| | V_{L} | 108 |
| Sofituzumab | V_{H} | 116 |
| | V_{L} | 121 |
| Edrecolomab | V_{H} | 129 |
| | V_{L} | 134 |
| Adecatumumab | V_{H} | 142 |
| | V_{L} | 147 |
| Anetumab | V_{H} | 155 |
| | V_{L} | 160 |
| huDS6 | V_{H} | 168 |
| | V_{L} | 173 |
| Lifastuzumab | V_{H} | 181 |
| | V_{L} | 186 |
| Sacituzumab | V_{H} | 194 |
| | V_{L} | 199 |
| PR1A3 | V_{H} | 207 |
| | V_{L} | 212 |
| Humanized PR1A3 | V_{H} | 811 |
| | V_{L} | 812 |
| Humanized Ab2-3 | V_{H} | 829 |
| | V_{L} | 830 |
| IMAB362, | V_{H} | 220 |
| Claudiximab | V_{L} | 225 |
| AMG595 | V_{H} | 259 |
| | V_{L} | 264 |
| ABT806 | V_{H} | 272 |
| | V_{L} | 277 |
| Sibrotuzumab | V_{H} | 285 |
| | V_{L} | 290 |
| DS-8895a variant 1 | V_{H} | 298 |
| | V_{L} | 303 |
| DS-8895a variant 2 | V_{H} | 311 |
| | V_{L} | 316 |
| Anti-EphA2 | V_{H} | 324 |
| | V_{L} | 329 |
| Narnatumab | V_{H} | 337 |
| | V_{L} | 342 |
| RG7841 | V_{H} | 350 |
| | V_{L} | 355 |
| Farletuzumab | V_{H} | 363 |
| | V_{L} | 368 |
| Mirvetuximab | V_{H} | 376 |
| | V_{L} | 381 |
| J591 variant 1 | V_{H} | 389 |
| | V_{L} | 394 |
| J591 variant 2 | V_{H} | 402 |
| | V_{L} | 407 |
| Rovalpituzumab | V_{H} | 415 |
| | V_{L} | 420 |
| PF-06647020 | V_{H} | 428 |
| | V_{L} | 433 |
| Anti-PTK7 | V_{H} | 441 |
| | V_{L} | 446 |
| Ladiratuzumab | V_{H} | 454 |
| | V_{L} | 459 |
| Cirmtuzumab | V_{H} | 467 |
| | V_{L} | 472 |
| Anti-MAGE-A3 | V_{H} | 480 |
| | V_{L} | 485 |
| Anti-NY-ESO-1 | V_{H} | 493 |
| | V_{L} | 498 |

TABLE 6
Additional Exemplary Tumor Antibody
V_{H} sequences and V_{L} sequences

| Antibody | Region | SEQ ID NO: |
|---|---|---|
| Pertuzumab | V_{H} | 12 |
| | V_{L} | 17 |
| Cetuximab | V_{H} | 25 |
| | V_{L} | 30 |
| Panitumumab | V_{H} | 38 |
| | V_{L} | 43 |
| | V_{L} | 498 |
| Trastuzumab | V_{H} | 679 |
| | V_{L} | 680 |

TABLE 7
Exemplary Tumor Antibody Heavy Chain
(HC) and Light Chain (LC) sequences

| Antibody | Region | SEQ ID NO: |
|---|---|---|
| Nimotuzumab | HC | 50 |
| | LC | 55 |
| Zalutumumab | HC | 63 |
| | LC | 68 |
| Onartuzumab | HC | 76 |
| | LC | 81 |
| Patritumab | HC | 89 |
| | LC | 94 |
| Clivatuzumab | HC | 102 |
| | LC | 107 |
| Sofituzumab | HC | 115 |
| | LC | 120 |
| Edrecolomab | HC | 128 |
| | LC | 133 |
| Adecatumumab | HC | 141 |
| | LC | 146 |
| Anetumab | HC | 154 |
| | LC | 159 |
| huDS6 | HC | 167 |
| | LC | 172 |
| Lifastuzumab | HC | 180 |
| | LC | 185 |
| Sacituzumab | HC | 193 |
| | LC | 198 |
| PR1A3 | HC | 206 |
| | LC | 211 |
| Humanized PR1A3 | HC | 813 |
| | LC | 814 |
| Humanized Ab2-3 | HC | 831 |
| | LC | 832 |
| IMAB362, | HC | 219 |
| Claudiximab | LC | 224 |
| AMG595 | HC | 258 |
| | LC | 263 |
| ABT806 | HC | 271 |
| | LC | 276 |
| Sibrotuzumab | HC | 284 |
| | LC | 289 |
| DS-8895a variant 1 | HC | 297 |
| | LC | 302 |
| DS-8895a variant 2 | HC | 310 |
| | LC | 315 |
| Anti-EphA2 | HC | 323 |
| | LC | 328 |
| Narnatumab | HC | 336 |
| | LC | 341 |
| RG7841 | HC | 349 |
| | LC | 354 |
| Farletuzumab | HC | 362 |
| | LC | 367 |
| Mirvetuximab | HC | 375 |
| | LC | 380 |
| J591 variant 1 | HC | 388 |
| | LC | 393 |
| J591 variant 2 | HC | 401 |
| | LC | 406 |
| Rovalpituzumab | HC | 414 |
| | LC | 419 |
| PF-06647020 | HC | 427 |
| | LC | 432 |
| Anti-PTK7 | HC | 440 |
| | LC | 445 |
| Ladiratuzumab | HC | 453 |
| | LC | 458 |
| Cirmtuzumab | HC | 466 |
| | LC | 471 |
| Anti-MAGE-A3 | HC | 479 |
| | LC | 484 |
| Anti-NY-ESO-1 | HC | 492 |
| | LC | 497 |
| | LC | 682 |

TABLE 8
Additional Exemplary Tumor Antibody Heavy
Chain (HC) and Light Chain (LC) sequences

| Antibody | Region | SEQ ID NO: |
|---|---|---|
| Pertuzumab | HC | 11 |
| | LC | 16 |
| Cetuximab | HC | 24 |
| | LC | 29 |
| Panitumumab | HC | 37 |
| | LC | 42 |
| | LC | 263 |
| Trastuzumab | HC | 681 |
| | LC | 682 |

TABLE 9
Exemplary Fusion Sequences - CD40 fusions via the heavy chain

| | SEQ |
|---|---|
| Fusion | ID NO: |
| HC CD40 mAb with Cetuximab ScFv | 34 |
| HC Cetuximab with CD40 mAb ScFv | 35 |
| HC CD40 mAb with Panitumumab ScFv | 47 |
| HC Panitumumab with CD40 mAb ScFv | 48 |
| HC CD40 mAb with Nimotuzumab ScFv | 60 |
| HC Nimotuzumab with CD40 mAb ScFv | 61 |
| HC CD40 mAb with Zalutumumab ScFv | 73 |
| HC Zalutumumab with CD40 mAb ScFv | 74 |
| HC CD40 mAb with Onartuzumab ScFv | 86 |
| HC Onartuzumab with CD40 mAb ScFv | 87 |
| HC CD40 mAb with Patritumab ScFv | 99 |
| HC Patritumab with CD40 mAb ScFv | 100 |
| HC CD40 mAb with Clivatuzumab ScFv | 112 |
| HC Clivatuzumab with CD40 mAb ScFv | 113 |
| HC CD40 mAb with Sofituzumab ScFv | 125 |
| HC Sofituzumab with CD40 mAb ScFv | 126 |
| HC CD40 mAb with Edrecolomab ScFv | 138 |
| HC Edrecolomab with CD40 mAb ScFv | 139 |
| HC CD40 mAb with Adecatumumab ScFv | 151 |
| HC Adecatumumab with CD40 mAb ScFv | 152 |
| HC CD40 mAb with Anetumab ScFv | 164 |
| HC Anetumab with CD40 mAb ScFv | 165 |
| HC CD40 mAb with huDS6 mAb ScFv | 177 |
| HC huDS6mAb with CD40 mAb ScFv | 178 |
| HC CD40 mAb with Lifastuzumab ScFv | 190 |
| HC Lifastuzumab with CD40 mAb ScFv | 191 |
| HC CD40 mAb with Sacituzumab ScFv | 203 |
| HC Sacituzumab with CD40 mAb ScFv | 204 |
| HC CD40 mAb with PR1A3 mAb ScFv | 216 |
| HC PR1A3mAb with CD40 mAb ScFv | 217 |
| HC CD40 mAb with Humanized PR1A3 mAb ScFv | 815 |
| HC Humanized PR1A3 mAb with CD40 mAb ScFv | 816 |
| HC Humanized PR1A3with CD40 mAb scFv (LH) | 843 |
| HC CD40 mAb with Humanized Ab2-3 mAb ScFv | 833 |
| HC Humanized Ab2-3 mAb with CD40 mAb ScFv | 834 |
| HC Humanized Ab2-3 mAb with CD40 mAb scFv (LH) | 841 |
| HC CD40 mAb with Claudiximab ScFv | 229 |
| HC Claudiximab with CD40 mAb ScFv | 230 |
| HC CD40 mAb with AMG595 mAb ScFv | 268 |
| HC AMG595 mAb with CD40 mAb ScFv | 269 |
| HC CD40 mAb with ABT806 mAb ScFv | 281 |
| HC ABT806 mAb with CD40 mAb ScFv | 282 |
| HC CD40 mAb with Sibrotuzumab mAb ScFv | 294 |
| HC Sibrotuzumab with CD40 mAb ScFv | 295 |
| HC CD40 mAb with DS-8895a variant 1 mAb ScFv | 307 |
| HC DS-8895a variant 1 mAb with CD40 mAb ScFv | 308 |
| HC CD40 mAb with DS-8895a variant 2 mAb ScFv | 320 |
| HC DS-8895a variant 2 mAb with CD40 mAb ScFv | 321 |
| HC CD40 mAb with Anti-EphA2 mAb ScFv | 333 |
| HC Anti-EphA2 mAb with CD40 mAb ScFv | 334 |
| HC CD40 mAb with Narnatumab mAb ScFv | 346 |
| HC Narnatumab mAb with CD40 mAb ScFv | 347 |
| HC CD40 mAb with RG7841 mAb ScFv | 359 |
| HC RG7841 mAb with CD40 mAb ScFv | 360 |
| HC CD40 mAb with Farletuzumab mAb ScFv | 372 |
| HC Farletuzumab mAb with CD40 mAb ScFv | 373 |
| HC CD40 mAb with Mirvetuximab mAb ScFv | 385 |
| HC Mirvetuximab mAb with CD40 mAb ScFv | 386 |
| HC CD40 mAb with J591 variant 1 mAb ScFv | 398 |
| HC J591 variant 1 mAb with CD40 mAb ScFv | 399 |
| HC CD40 mAb with J591 variant 2 mAb ScFv | 411 |
| HC J591 variant 2 mAb with CD40 mAb ScFv | 412 |
| HC CD40 mAb with Rovalpituzumab mAb ScFv | 424 |
| HC Rovalpituzumab mAb with CD40 mAb ScFv | 425 |
| HC CD40 mAb with PF-06647020 mAb ScFv | 437 |
| HC PF-06647020 mAb with CD40 mAb ScFv | 438 |
| HC CD40 mAb with anti-PTK7 mAb ScFv | 450 |
| HC PTK7 mAb with CD40 mAb ScFv | 451 |
| HC CD40 mAb with mAb of Ladiratuzumab ScFv | 463 |
| HC Ladiratuzumab with CD40 mAb ScFv | 464 |
| HC CD40 mAb with Cirmtuzumab mAb ScFv | 476 |
| HC Cirmtuzumab mAb with CD40 mAb ScFv | 477 |
| HC CD40 mAb with anti-MAGE-A3 mAb ScFv | 489 |
| HC tumor mAb with CD40 mAb ScFv | 490 |
| HC CD40 mAb with anti-NY-ESO-1 mAb ScFv | 502 |
| HC anti-NY-ESO-1 mAb with CD40 mAb ScFv | 503 |

TABLE 10
Additional Exemplary Fusion Sequences -
CD40 fusions via the heavy chain

| | SEQ |
|---|---|
| Fusion | ID NO: |
| HC CD40 mAb with Pertuzumab ScFv | 21 |
| HC Pertuzumab with CD40 mAb ScFv | 22 |
| HC Pertuzumab with CD40 mAb scFv (LH) | 845 |
| HC CD40 mAb with Trastuzumab mAb ScFv | 683 |
| HC Trastuzumab mAb with CD40 mAb ScFv | 684 |
| HC CD40 mAb with Trastuzumab mAb ScFv (LH, 25mer) | 796 |

TABLE 11
Exemplary APC Antibody CDRs

| Antibody | Region | SEQ ID NO: |
|---|---|---|
| CP-870893 | HCDR1 | 3 |
| | HCDR2 | 4 |
| | HCDR3 | 5 |
| | LCDR1 | 8 |
| | LCDR2 | 9 |
| | LCDR3 | 10 |
| DEC-205 variant 1 | HCDR1 | 234 |
| | HCDR2 | 235 |
| | HCDR3 | 236 |
| | LCDR1 | 239 |
| | LCDR2 | 240 |
| | LCDR3 | 241 |
| DEC-205 variant 2 | HCDR1 | 247 |
| | HCDR2 | 248 |
| | HCDR3 | 249 |
| | LCDR1 | 252 |
| | LCDR2 | 253 |
| | LCDR3 | 254 |
| DC-SIGN variant 1 | HCDR1 | 640 |
| | HCDR2 | 641 |
| | HCDR3 | 642 |
| | LCDR1 | 643 |
| | LCDR2 | 644 |
| | LCDR3 | 645 |
| DC-SIGN variant 2 | HCDR1 | 646 |
| | HCDR2 | 647 |
| | HCDR3 | 648 |
| | LCDR1 | 649 |
| | LCDR2 | 650 |
| | LCDR3 | 651 |
| DC-SIGN variant 3 | HCDR1 | 652 |
| | HCDR2 | 653 |
| | HCDR3 | 654 |
| | LCDR1 | 655 |
| | LCDR2 | 656 |
| | LCDR3 | 657 |

TABLE 12
Additional Exemplary APC Antibody CDRs

| Antibody | Region | SEQ ID NO: |
|---|---|---|
| SBT-040 (G1/G2) | HCDR1 | 3 |
| | HCDR2 | 4 |
| | HCDR3 | 5 |
| | LCDR1 | 8 |
| | LCDR2 | 9 |
| | LCDR3 | 10 |
| Dacetuzumab | HCDR1 | 582 |
| | HCDR2 | 583 |
| | HCDR3 | 584 |
| | LCDR1 | 587 |
| | LCDR2 | 588 |
| | LCDR3 | 589 |
| Bleselumab | HCDR1 | 592 |
| | HCDR2 | 593 |
| | HCDR3 | 594 |
| | LCDR1 | 597 |
| | LCDR2 | 598 |
| | LCDR3 | 599 |
| lucatumumab | HCDR1 | 602 |
| | HCDR2 | 603 |
| | HCDR3 | 604 |
| | LCDR1 | 607 |
| | LCDR2 | 608 |
| | LCDR3 | 609 |
| ADC-1013 | HCDR1 | 612 |
| | HCDR2 | 613 |
| | HCDR3 | 614 |
| | LCDR1 | 617 |
| | LCDR2 | 618 |
| | LCDR3 | 619 |
| APX005 | HCDR1 | 622 |
| | HCDR2 | 623 |
| | HCDR3 | 624 |
| | LCDR1 | 627 |
| | LCDR2 | 628 |
| | LCDR3 | 629 |
| Chi Lob 7/4 | HCDR1 | 632 |
| | HCDR2 | 633 |
| | HCDR3 | 634 |
| | LCDR1 | 637 |
| | LCDR2 | 638 |
| | LCDR3 | 639 |
| | HCDR2 | 653 |
| | HCDR3 | 654 |
| | LCDR1 | 655 |
| | LCDR2 | 656 |
| | LCDR3 | 657 |

TABLE 13
Exemplary APC Antibody V_{H} sequences and V_{L} sequences

| Antibody | Region | SEQ ID NO: |
|---|---|---|
| CP-870893 | V_{H} | 2 |
| | V_{L} | 7 |
| DEC-205 variant 1 | V_{H} | 233 |
| | V_{L} | 238 |
| DEC-205 variant 2 | V_{H} | 246 |
| | V_{L} | 251 |
| CD36 mannose | V_{H} | 658 |
| Scavenger Receptor | V_{L} | 659 |
| CLEC9A | V_{H} | 660 |
| | V_{L} | 661 |

TABLE 14
Additional Exemplary APC Antibody
V_{H} sequences and V_{L} sequences

| Antibody | Region | SEQ ID NO: |
|---|---|---|
| SBT-040 | V_{H} | 2 |
| | V_{L} | 7 |
| Dacetuzumab | V_{H} | 581 |
| | V_{L} | 586 |
| Bleselumab | V_{H} | 591 |
| | V_{L} | 596 |
| Lucatumumab | V_{H} | 601 |
| | V_{L} | 606 |
| ADC-1013 | V_{H} | 611 |
| | V_{L} | 616 |
| APX005 | V_{H} | 621 |
| | V_{L} | 626 |
| Chi Lob 7/4 | V_{H} | 631 |
| | V_{L} | 636 |

TABLE 15
Exemplary APC Antibody Heavy Chain and Light Chain sequences

| Antibody | Region | SEQ ID NO: |
|---|---|---|
| CP-870893 | HC | 1 |
| | LC | 6 |
| DEC-205 | HC | 232 |
| (QVQLVQvariant 1) | LC | 237 |
| DEC-205 | HC | 245 |
| (variant 2) | LC | 250 |
| CLEC12A | HC variant 1 | 662 |
| | HC variant 2 | 663 |
| | HC variant 3 | 664 |
| | LC | 665 |
| BDCA-2 | HC | 666 |
| Variant 1 | LC | 669 |
| BDCA-2 | HC | 667 |
| Variant 2 | LC | 670 |
| BDCA-2 | HC | 668 |
| Variant 3 | LC | 671 |

TABLE 16
Additional Exemplary APC Antibody Heavy
Chain and Light Chain sequences

| Antibody | Region | SEQ ID NO: |
|---|---|---|
| Anti-CD40 | HC (IgG1) | 577 |
| | HC (IgG2) | 578 |
| | LC | 579 |
| Dacetuzumab | HC | 580 |
| | LC | 585 |
| Bleselumab | HC | 590 |
| | LC | 595 |
| Lucatumumab | HC | 600 |
| | LC | 605 |
| ADC-1013 | HC | 610 |
| | LC | 615 |
| APX005 | HC | 620 |
| | LC | 625 |
| Chi Lob 7/4 | HC | 630 |
| | LC | 635 |

TABLE 17
Exemplary Fusion Sequences - DEC-
205 fusions via the heavy chain

| | SEQ |
|---|---|
| Fusion | ID NO: |
| HC DEC-205 mAb with Pertuzumab mAb ScFv | 505 |
| HC Pertuzumab with DEC-205 mAb ScFv | 506 |
| LC Pertuzumab containing CD40 mab scFv (LH) | 846 |
| HC DEC-205 mAb with Cetuximab mAb ScFv | 507 |
| HC Cetuximab with DEC-205 mAb ScFv | 508 |
| HC DEC-205 mAb with Panitumumab mAb ScFv | 509 |
| HC Panitumumab with DEC-205 mAb ScFv | 510 |
| HC DEC-205 mAb with Nimotuzumab mAb ScFv | 511 |
| HC Nimotuzumab with DEC-205 mAb ScFv | 512 |
| HC DEC-205 mAb with Zalutumumab mAb ScFv | 513 |
| HC Zalutumumab with DEC-205 mAb ScFv | 514 |
| HC DEC-205 mAb with Onartuzumab mAb ScFv | 515 |
| HC Onartuzumab with DEC-205 mAb ScFv | 516 |
| HC DEC-205 mAb with Patritumab ScFv | 517 |
| HC Patritumab with DEC-205 mAb ScFv | 518 |
| HC DEC-205 mAb with Clivatuzumab ScFv | 519 |
| HC Clivatuzumab with DEC-205 mAb ScFv | 520 |
| HC DEC-205 mAb with Sofituzumab ScFv | 521 |
| HC Sofituzumab with DEC-205 mAb ScFv | 522 |
| HC DEC-205 mAb with Edrecolomab ScFv | 523 |
| HC Edrecolomab with DEC-205 mAb ScFv | 524 |
| HC DEC-205 mAb with Adecatumumab ScFv | 525 |
| HC Adecatumumab with DEC-205 mAb ScFv | 526 |
| HC DEC-205 mAb with Anetumab ScFv | 527 |
| HC Anetumab with DEC-205 mAb ScFv | 528 |
| HC DEC-205 mAb with huDS6 mAb ScFv | 529 |
| HC huDS6 mAb with DEC-205 mAb ScFv | 530 |
| HC DEC-205 mAb with Lifastuzumab ScFv | 531 |
| HC Lifastuzumab with DEC-205 mAb ScFv | 532 |
| HC DEC-205 mAb with Sacituzumab ScFv | 533 |
| HC Sacituzumab with DEC-205 mAb ScFv | 534 |
| HC DEC-205 mAb with PR1A3 mAb ScFv | 535 |
| HC PR1A3 mAb with DEC-205 mAb ScFv | 536 |
| HC DEC-205 mAb with Humanized PR1A3 mAb ScFv | 818 |
| HC Humanized PR1A3 mAb with DEC-205 mAb ScFv | 819 |
| HC DEC-205 mAb with Humanized Ab2-3 mAb ScFv | 836 |
| HC Humanized Ab2-3 mAb with DEC-205 mAb ScFv | 837 |
| HC DEC-205 mAb with Claudiximab ScFv | 537 |
| HC Claudiximab with DEC-205 mAb ScFv | 538 |
| HC DEC-205 mAb with AMG595 mAb ScFv | 539 |
| HC AMG595 mAb with DEC-205 mAb ScFv | 540 |
| HC DEC-205 mAb with ABT806 mAb ScFv | 541 |
| HC ABT806 mAb with DEC-205 mAb ScFv | 542 |
| HC DEC-205 mAb with Sibrotuzumab ScFv | 543 |
| HC Sibrotuzumab with DEC-205 mAb ScFv | 544 |
| HC DEC-205 mAb with DS-8895a variant 1 mAb ScFv | 545 |
| HC DS-8895a variant 1 with DEC-205 mAb ScFv | 546 |
| HC DEC-205 mAb with DS-8895a variant 2 mAb ScFv | 547 |
| HC DS-8895a variant 2 mAb with DEC-205 mAb ScFv | 548 |
| HC DEC-205 mAb with Anti-EphA2 mAb ScFv | 549 |
| HC Anti-EphA2 mAb with DEC-205 mAb ScFv | 550 |
| HC DEC-205 mAb with Narnatumab mAb ScFv | 551 |
| HC Narnatumab with DEC-205 mAb ScFv | 552 |
| HC DEC-205 mAb with RG7841 mAb ScFv | 553 |
| HC RG7841 mAb with DEC-205 mAb ScFv | 554 |
| HC DEC-205 mAb with Farletuzumab ScFv | 555 |
| HC Farletuzumab with DEC-205 mAb ScFv | 556 |
| HC DEC-205 mAb with Mirvetuximab ScFv | 557 |
| HC Mirvetuximab with DEC-205 mAb ScFv | 558 |
| HC DEC-205 mAb with J591 variant 1 mAb ScFv | 559 |
| HC J591 variant 1 mAb with DEC-205 mAb ScFv | 560 |
| HC DEC-205 mAb with J591 variant 2 mAb ScFv | 561 |
| HC J591 variant 2 mAb with DEC-205 mAb ScFv | 562 |
| HC DEC-205 mAb with Rovalpituzumab mAb ScFv | 563 |
| HC Rovalpituzumab with DEC-205 mAb ScFv | 564 |
| HC DEC-205 mAb with PF-06647020 mAb ScFv | 565 |
| HC PF-06647020 mAb with DEC-205 mAb ScFv | 566 |
| HC DEC-205 mAb with anti-PTK7 mAb ScFv | 567 |
| HC anti-PTK7 mAb with DEC-205 mAb ScFv | 568 |
| HC DEC-205 mAb with Ladiratuzumab ScFv | 569 |
| HC Ladiratuzumab with DEC-205 mAb ScFv | 570 |
| HC DEC-205 mAb with Cirmtuzumab ScFv | 571 |
| HC Cirmtuzumab with DEC-205 mAb ScFv | 572 |
| HC DEC-205 mAb with anti-MAGE-A3 mAb ScFv | 573 |
| HC anti-MAGE-A3 mAb with DEC-205 mAb ScFv | 574 |
| HC DEC-205 mAb with anti-NY-ESO-1 mAb ScFv | 575 |
| HC anti-NY-ESO-1 mAb with DEC-205 mAb ScFv | 576 |
| HC DEC-205 mAb with Trastuzumab ScFv | 686 |
| HC Trastuzumab with DEC-205 mAb ScFv | 687 |
| HC DEC205 mAb with Trastuzumab ScFv (LH, 25mer) | 797 |

TABLE 18
Exemplary Fusion Sequences - CD40 fusions via the light chain

| | SEQ |
|---|---|
| Fusion | ID NO: |
| LC CD40 mAb containing Pertuzumab ScFv | 766 |
| LC Pertuzumab containing CD40 mAb ScFv | 23 |
| LC CD40 mAb containing Cetuximab ScFv | 703 |
| LC Cetuximab containing CD40 mAb ScFv | 36 |
| LC CD40 mAb containing Panitumumab ScFv | 760 |
| LC Panitumumab containing CD40 mAb ScFv | 49 |
| LC CD40 mAb containing Nimotuzumab ScFv | 751 |
| LC Nimotuzumab containing CD40 mAb ScFv | 62 |
| LC CD40 mAb containing Zalutumumab ScFv | 802 |
| LC Zalutumumab containing CD40 mAb ScFv | 75 |
| LC CD40 mAb containing Onartuzumab ScFv | 757 |
| LC Onartuzumab containing CD40 mAb ScFv | 88 |
| LC CD40 mAb containing Patritumab ScFv | 763 |
| LC Patritumab containing CD40 mAb ScFv | 101 |
| LC CD40 mAb containing Clivatuzumab ScFv | 709 |
| LC Clivatuzumab containing CD40 mAb ScFv | 114 |
| LC CD40 mAb containing Sofituzumab ScFv | 790 |
| LC Sofituzumab containing CD40 mAb ScFv | 127 |
| LC CD40 mAb containing Edrecolomab ScFv | 718 |
| LC Edrecolomab containing CD40 mAb ScFv | 140 |
| LC CD40 mAb containing Adecatumumab ScFv | 694 |
| LC Adecatumumab containing CD40 mAb ScFv | 153 |
| LC CD40 mAb containing Anetumab ScFv | 700 |
| LC Anetumab containing CD40 mAb ScFv | 166 |
| LC CD40 mAb containing huDS6 mAb ScFv | 724 |
| LC huDS6 mAb containing CD40 mAb ScFv | 179 |
| LC CD40 mAb containing Lifastuzumab ScFv | 736 |
| LC Lifastuzumab containing CD40 mAb ScFv | 192 |
| LC CD40 mAb containing Sacituzumab ScFv | 781 |
| LC Sacituzumab containing CD40 mAb ScFv | 205 |
| LC CD40 mAb containing PR1A3 mAb ScFv | 772 |
| LC PR1A3 mAb containing CD40 mAb ScFv | 218 |
| LC CD40 mAb containing Humanized PR1A3 mAb ScFv | 820 |
| LC Humanized PR1A3 mAb containing CD40 mAb ScFv | 817 |
| LC Humanized PR1A3 mAb containing CD40 mab scFv (LH) | 844 |
| LC CD40 mAb containing Humanized Ab2-3 mAb ScFv | 838 |
| LC Humanized Ab2-3 mAb containing CD40 mAb ScFv | 835 |
| LC Humanized Ab2-3 mAb containing CD40 mab scFv (LH) | 842 |
| LC CD40 mAb containing Claudiximab ScFv | 727 |
| LC Claudiximab containing CD40 mAb ScFv | 231 |
| LC CD40 mAb containing AMG595 mAb ScFv | 697 |
| LC AMG595 mAb containing CD40 mAb ScFv | 270 |
| LC CD40 mAb containing ABT806 mAb ScFv | 691 |
| LC ABT806 mAb containing CD40 mAb ScFv | 283 |
| LC CD40 mAb containing Sibrotuzumab ScFv | 787 |
| LC Sibrotuzumab containing CD40 mAb ScFv | 296 |
| LC CD40 mAb containing DS-8895a variant 1 mAb ScFv | 712 |
| LC DS-8895a variant 1 mAb containing CD40 mAb ScFv | 309 |
| LC CD40 mAb containing DS-8895a variant 2 mAb ScFv | 715 |
| LC DS-8895a variant 2 mAb containing CD40 mAb ScFv | 322 |
| LC CD40 mAb containing Anti-EphA2 mAb ScFv | 742 |
| LC Anti-EphA2 mAb containing CD40 mAb ScFv | 335 |
| LC CD40 mAb containing Narnatumab ScFv | 748 |
| LC Narnatumab containing CD40 mAb ScFv | 348 |
| LC CD40 mAb containing RG7841 mAb ScFv | 775 |
| LC RG7841 mAb containing CD40 mAb ScFv | 361 |
| LC CD40 mAb containing Farletuzumab ScFv | 721 |
| LC Farletuzumab containing CD40 mAb ScFv | 374 |
| LC CD40 mAb containing Mirvetuximab ScFv | 745 |
| LC Mirvetuximab containing CD40 mAb ScFv | 387 |
| LC CD40 mAb containing J591 variant 1 mAb ScFv | 730 |
| LC J591 variant 1 mAb containing CD40 mAb ScFv | 400 |
| LC CD40 mAb containing J591 variant 2 mAb ScFv | 733 |
| LC J591 variant 2 mAb containing CD40 mAb ScFv | 413 |
| LC CD40 mAb containing Rovalpituzumab ScFv | 778 |
| LC Rovalpituzumab containing CD40 mAb ScFv | 426 |
| LC CD40 mAb containing PF-06647020 mAb ScFv | 769 |
| LC PF-06647020 mAb containing CD40 mAb ScFv | 439 |
| LC CD40 mAb containing anti-PTK7 mAb ScFv | 688 |
| LC anti-PTK7 mAb containing CD40 mAb ScFv | 452 |
| LC CD40 mAb containing Ladiratuzumab ScFv | 784 |
| LC Ladiratuzumab containing CD40 mAb ScFv | 465 |
| LC CD40 mAb containing Cirmtuzumab ScFv | 706 |
| LC Cirmtuzumab containing CD40 mAb ScFv | 478 |
| LC CD40 mAb containing anti-MAGE-A3 mAb ScFv | 739 |
| LC anti-MAGE-A3 mAb containing CD40 mAb ScFv | 491 |
| LC CD40 mAb containing anti-NY-ESO-1 mAb ScFv | 754 |
| LC anti-NY-ESO-1 mAb containing CD40 mAb ScFv | 504 |
| LC CD40 mAb containing Trastuzumab ScFv | 793 |
| LC Trastuzumab containing CD40 mAb ScFv | 685 |
| LC CD40 mAb containing Trastuzumab scFv (LH, 25mer) | 798 |

TABLE 19
Exemplary Fusion Sequences - DEC-205 fusions via the light chain

| | SEQ |
|---|---|
| Fusion | ID NO: |
| LC DEC-205 mAb containing Pertuzumab ScFv | 767 |
| LC Pertuzumab containing DEC-205 mAb ScFv | 768 |
| LC DEC-205 mAb containing Cetuximab ScFv | 704 |
| LC Cetuximab containing DEC-205 mAb ScFv | 705 |
| LC DEC-205 mAb containing Panitumumab ScFv | 761 |
| LC Panitumumab containing DEC-205 mAb ScFv | 762 |
| LC DEC-205 mAb containing Nimotuzumab ScFv | 752 |
| LC Nimotuzumab containing DEC-205 mAb ScFv | 753 |
| LC DEC-205 mAb containing Zalutumumab ScFv | 803 |
| LC Zalutumumab containing DEC-205 mAb ScFv | 804 |
| LC DEC-205 mAb containing Onartuzumab ScFv | 758 |
| LC Onartuzumab containing DEC-205 mAb ScFv | 759 |
| LC DEC-205 mAb containing Patritumab ScFv | 764 |
| LC Patritumab containing DEC-205 mAb ScFv | 765 |
| LC DEC-205 mAb containing Clivatuzumab ScFv | 710 |
| LC Clivatuzumab containing DEC-205 mAb ScFv | 711 |
| LC DEC-205 mAb containing Sofituzumab ScFv | 791 |
| LC Sofituzumab containing DEC-205 mAb ScFv | 792 |
| LC DEC-205 mAb containing Edrecolomab ScFv | 719 |
| LC Edrecolomab containing DEC-205 mAb ScFv | 720 |
| LC DEC-205 mAb containing Adecatumumab ScFv | 695 |
| LC Adecatumumab containing DEC-205 mAb ScFv | 696 |
| LC DEC-205 mAb containing Anetumab ScFv | 701 |
| LC Anetumab containing DEC-205 mAb ScFv | 702 |
| LC DEC-205 mAb containing huDS6 mAb ScFv | 725 |
| LC huDS6 mAb containing DEC-205 mAb ScFv | 726 |
| LC DEC-205 mAb containing Lifastuzumab ScFv | 737 |
| LC Lifastuzumab containing DEC-205 mAb ScFv | 738 |
| LC DEC-205 mAb containing Sacituzumab ScFv | 782 |
| LC Sacituzumab containing DEC-205 mAb ScFv | 783 |
| LC DEC-205 mAb containing PR1A3 mAb ScFv | 773 |
| LC PR1A3 mAb containing DEC-205 mAb ScFv | 774 |
| LC DEC-205 mAb containing Humanized PR1A3 mAb ScFv | 821 |
| LC Humanized PR1A3 mAb containing DEC-205 mAb ScFv | 822 |
| LC DEC-205 mAb containing Humanized Ab2-3 mAb ScFv | 839 |
| LC Humanized Ab2-3 mAb containing DEC-205 mAb ScFv | 840 |
| LC DEC-205 mAb containing Claudiximab ScFv | 728 |
| LC Claudiximab containing DEC-205 mAb ScFv | 729 |
| LC DEC-205 mAb containing AMG595 mAb ScFv | 698 |
| LC AMG595 mAb containing DEC-205 mAb ScFv | 699 |
| LC DEC-205 mAb containing ABT806 mAb ScFv | 692 |
| LC ABT806 mAb containing DEC-205 mAb ScFv | 693 |
| LC DEC-205 mAb containing Sibrotuzumab ScFv | 788 |
| LC Sibrotuzumab containing DEC-205 mAb ScFv | 789 |
| LC DEC-205 mAb containing DS-8895a variant 1 mAb ScFv | 713 |
| LC DS-8895a variant 1 mAb containing DEC-205 mAb ScFv | 714 |
| LC DEC-205 mAb containing DS-8895a variant 2 mAb ScFv | 716 |
| LC DS-8895a variant 2 mAb containing DEC-205 mAb ScFv | 717 |
| LC DEC-205 mAb containing Anti-EphA2 mAb ScFv | 743 |
| LC Anti-EphA2 mAb containing DEC-205 mAb ScFv | 744 |
| LC DEC-205 mAb containing Narnatumab ScFv | 749 |
| LC Narnatumab containing DEC-205 mAb ScFv | 750 |
| LC DEC-205 mAb containing RG7841 mAb ScFv | 776 |
| LC RG7841 mAb containing DEC-205 mAb ScFv | 777 |
| LC DEC-205 mAb containing Farletuzumab ScFv | 722 |
| LC Farletuzumab containing DEC-205 mAb ScFv | 723 |
| LC DEC-205 mAb containing Mirvetuximab ScFv | 746 |
| LC Mirvetuximab containing DEC-205 mAb ScFv | 747 |
| LC DEC-205 mAb containing J591 variant 1 mAb ScFv | 731 |
| LC J591 variant 1 mAb containing DEC-205 mAb ScFv | 732 |
| LC DEC-205 mAb containing J591 variant 2 mAb ScFv | 734 |
| LC J591 variant 2 mAb containing DEC-205 mAb ScFv | 735 |
| LC DEC-205 mAb containing Rovalpituzumab ScFv | 779 |
| LC Rovalpituzumab containing DEC-205 mAb ScFv | 780 |
| LC DEC-205 mAb containing PF-06647020 mAb ScFv | 770 |
| LC PF-06647020 mAb containing DEC-205 mAb ScFv | 771 |
| LC DEC-205 mAb containing anti-PTK7 mAb ScFv | 689 |
| LC anti-PTK7 mAb containing DEC-205 mAb ScFv | 690 |
| LC DEC-205 mAb containing Ladiratuzumab ScFv | 785 |
| LC Ladiratuzumab containing DEC-205 mAb ScFv | 786 |
| LC DEC-205 mAb containing Cirmtuzumab ScFv | 707 |
| LC Cirmtuzumab containing DEC-205 mAb ScFv | 708 |
| LC DEC-205 mAb containing anti-MAGE-A3 mAb ScFv | 740 |
| LC anti-MAGE-A3 mAb containing DEC-205 mAb ScFv | 741 |
| LC DEC-205 mAb containing anti-NY-ESO-1 mAb ScFv | 755 |
| LC anti-NY-ESO-1 mAb containing DEC-205 mAb ScFv | 756 |
| LC DEC-205 mAb containing Trastuzumab ScFv | 794 |
| LC Trastuzumab containing DEC-205 mAb ScFv | 795 |
| LC DEC205 mAb containing Trastuzumab scFv (LH, 25mer) | 799 |

TABLE 20
Exemplary Fusion Sequences - CD40 fusion with DEC205

| | SEQ |
|---|---|
| Region | ID NO: |
| HC DEC205 variant 1 mAb with CD40 mAb ScFv | 243 |
| HC CD40 mAb with DEC205 variant 1 mAb ScFv | 242 |
| LC DEC205 variant 1 mAb containing CD40 mAb scFv | 244 |
| LC CD40 mAb containing DEC205 variant 1mAb scFv | 800 |
| HC DEC205 variant 2 mAb with CD40 mAb ScFv | 256 |
| HC CD40 mAb with DEC205 variant 2 mAb ScFv | 255 |
| LC DEC205 variant 2 mAb containing CD40 mAb scFv | 257 |
| LC CD40 mAb containing DEC205 variant 2 mAb scFv | 801 |

[0273] In some aspects, an antibody construct comprising: a) a first binding domain, wherein the first binding domain specifically binds to a tumor antigen; b) a second binding domain, wherein the second binding domain specifically binds to an antigen on an antigen presenting cell, wherein the antigen is a molecule on the antigen presenting cell; and c) an Fc domain; wherein the first binding domain is attached to the Fc domain and the second binding domain is attached to the Fc domain or to a C-terminal end of a light chain of the first binding domain, and wherein a K_{d} for binding of the Fc domain to an Fc receptor in a presence of the first binding domain and the second binding domain is no greater than about 100 times a K_{d} for binding of the Fc domain to the Fc receptor in an absence of the second binding domain.

[0274] In some aspects, an antibody construct for use in inducing immune cell activation comprising: a) a first binding domain, wherein the first binding domain specifically binds to a tumor antigen; b) a second binding domain, wherein the second binding domain specifically binds to an antigen on an antigen presenting cell, wherein the antigen is a molecule on the antigen presenting cell; and c) an Fc domain; wherein the first binding domain is attached to the Fc domain and the second binding domain is attached to the Fc domain or to a C-terminal end of a light chain of the first binding domain, and wherein a K_{d} for binding of the Fc domain to an Fc receptor in a presence of the first binding domain and the second binding domain is no greater than about 100 times a K_{d} for binding of the Fc domain to the Fc receptor in an absence of the second binding domain; and wherein immune cell activation caused by the antibody construct upon binding to tumor antigen as measured by a cytokine release assay is greater than immune cell activation caused by the antibody construct in the absence of binding to tumor antigen.

[0275] In some embodiments, the second binding domain is attached to the Fc domain or the light chain of the first binding domain: a) as an Fc domain-second binding domain fusion peptide; b) as a light chain-second binding domain fusion peptide; or c) by a conjugation via a first linker. In some embodiments, the Fc domain is attached to the first binding domain: a) as an Fc domain-first binding domain fusion peptide; or b) by conjugation via a second linker.

[0276] In some embodiments, the Fc domain is attached to both the first binding domain and to the second binding domain as a first binding domain-Fc domain-second binding domain fusion peptide. In some embodiments, the first binding domain is attached to both the Fc domain and the second binding domain as a first binding domain-second binding domain-Fc domain fusion peptide. In some embodiments, the first binding domain and the Fc domain comprise an antibody and the second binding domain comprises a single chain variable fragment (scFv).

[0277] In some embodiments, the first binding domain has a set of variable region CDR sequences that comprises a set of variable region CDR sequences set forth in TABLE 3 or TABLE 4. In some embodiments, the second binding domain comprises a variable domain comprising a set of CDR sequences set forth in TABLE 11 or TABLE 12.

[0278] In some embodiments, the first binding domain comprises a variable region comprising VH and VL sequences at least 80% sequence identity to a pair of VH and VL sequences set forth in TABLE 5 or TABLE 6.

[0279] In some embodiments, the second binding domain comprises a variable region having VH and VL sequences having at least 80% sequence identity to a VH or VL sequence set forth in TABLE 13 or TABLE 14.

[0280] In some embodiments, the first binding domain comprises an amino acid sequence having at least 80% sequence identity to any sequence in TABLE 7 or TABLE 8. In some embodiments, the second binding domain comprises an amino acid sequence having at least 80% sequence identity to any sequence in TABLE 15 or TABLE 16.

[0281] In some embodiments, the second binding domain-Fc domain-first binding domain fusion peptide as described herein comprises an amino acid sequence having at least 80% sequence identity to a sequence in TABLE 9, TABLE 10, or TABLE 17. In some embodiments, the second binding domain-first binding domain-Fc domain fusion peptide as described herein comprises an amino acid sequence having at least 80% sequence identity to a sequence in TABLE 18 or TABLE 19.

[0282] In some embodiments, the first binding domain comprises an amino acid sequence having at least 80% sequence identity to any sequence in TABLE 7 or TABLE 15.

[0283] In some embodiments, the antibody construct or conjugate induces secretion of cytokines by an immune cell as measured by a cytokine release assay. In some embodiments, the cytokine is IFN-γ, IL-8, IL-12, IL-2, or a combination thereof. In some embodiments, the antibody construct or conjugate induces antigen presentation on a dendritic cell, B cell, macrophage, or a combination thereof.

### Recombinant Bispecific Antibodies

[0284] In certain embodiments, recombinant antibodies are provided that are “bispecific” that possess the ability to specifically bind to two different targets through at least two different antigen binding domains (referred to as recombinant bispecific antibodies, bispecific recombinant antibodies or the like). These antibodies have a target antigen binding domain and an effector antigen binding domain. The target antigen binding domain specifically binds to a tumor associated antigen. The effector antigen binding domain specifically binds to a molecule present on an antigen presenting cell (APC).

[0285] The recombinant bispecific antibodies can exhibit more potent immune activation when both antigen binding domains are bound to their respective antigens. One format for increasing immune activation when both antigen binding domains are bound to their respective antigens can be accomplished by a recombinant bispecific antibody coupled to an Fc comprising domain that exhibits reduced affinity to an Fc receptor. Another format for achieving an increased immune activation when both antigen binding domains are bound to their respective antigens can be accomplished by using a binding domain with a low avidity for its antigen as one of the antigen binding domains in the recombinant bispecific antibody. One binding domain of the bispecific antibody can specifically bind to a tumor associated antigen and another binding domain can specifically bind to a molecule on the surface of an antigen presenting cell (APC), such as a macrophage or dendritic cell. Thus, the two binding domains cooperate to bring APCs to cancerous cells or tumors allowing the APC to initiate/propagate a cancer cell/tumor specific immune response through cytokine release, chemokine release, or presentation of tumor associated antigens to effector or helper T cells. Cytokine release can be measured by a cytokine release assay. Chemokine release can be measured by an ELISA immunoassay. Presentation of tumor associated antigens can be measured by a cross-presentation assay.

[0286] Therapy with recombinant monoclonal or bispecific antibodies can generally be well tolerated; however, antibodies directed to immune response stimulating receptors on immune cells can result in systemic toxic release of cytokines and other immune modulators that can limit their clinical use or dose, thereby limiting their effectiveness in generating patient anti-tumor responses. This immune activation can be especially non-beneficial when it occurs systemically in the absence of tumor antigens. The systemic agonism exhibited by antibodies to many APC receptors can depend upon high affinity binding to the APC antigen and higher order cross-linking of the APC receptors by clustering of the cell bound antibodies. Many studies show this can be mediated by Fc gamma receptor (FcγR) binding to the Fc domain of the antibodies, and cross-linking of different antibody molecules and their bound APC immune stimulating receptors. An additional complication of cross-linking by FcγR can be antibody dependent cell mediated cytotoxicity (ADCC) of the APCs resulting in lowered immune response to tumors and pathogens. ADCC can be attributed to the antibody Fc region which binds to FcγRs on effector cells (e.g., NK cells). Two non-mutually exclusive solutions to the above can be contemplated. In one, elevating the threshold for FcγR binding can reduce excessive systemic immune activation and unwanted ADCC directed to APCs of antibody therapy. In the second, the affinity of the antibody for its APC target can be lowered so that effective agonistic binding of antibody molecules to APCs can be driven by avidity, preferentially found when the bispecific antibody is bound to its tumor antigen target. As described herein, the Fc comprising domain of the recombinant bispecific antibody can contain one or more mutations that can reduce binding to an FcγR. Alternatively, the Fc comprising domain can be derived from an IgG subclass that can bind to FcγRs with low affinity, for example IgG2. Fc receptors can be highly expressed on different antigen presenting cells such as dendritic cells, and their engagement can lead to activation of the immunostimulatory and antigen presenting function of these cells. By reducing binding of the Fc comprising domain to the FcγR, the threshold for APC activation can be raised. By raising the threshold for APC activation, the possibility of a damaging, or non-beneficial, immune/inflammatory response to healthy, non-cancerous tissue can be reduced. Attenuating activation by modifications made to the Fc comprising domain can result in superior bioavailability and lower side effects. Also described herein are recombinant bispecific antibodies with high affinity anti-tumor antigen binding and low affinity immune receptor binding such that APC activation can be increased when the recombinant bispecific antibody is bound to its tumor antigen. As a result, the antibodies of this disclosure generally can have a higher maximum tolerated dosage, and can be administered at levels higher than therapeutic antibodies not modified as described herein.

[0287] In some embodiments, a recombinant bispecific antibody comprises a target antigen binding domain, wherein the target antigen binding domain specifically binds to a tumor associated antigen; an effector antigen binding domain, wherein the effector antigen binding domain specifically binds to a molecule present on an antigen presenting cell and is not a lipocalin mutein; and an Fc comprising domain; wherein the recombinant bispecific antibody induces more potent immune activation when the recombinant bispecific antibody is bound to the tumor associated antigen and to the molecule on the antigen presenting cell as compared to when the recombinant bispecific antibody is bound to the molecule on the antigen presenting cell but not to the tumor associated antigen. In some aspects, immune activation by the recombinant bispecific antibody when bound to the tumor associated antigen is at least two times, five times, or ten times greater than immune activation by the recombinant bispecific antibody when the recombinant bispecific antibody is not bound to the tumor associated antigen.

[0288] In some embodiments, immune activation by the recombinant bispecific antibody is greater in the presence of cells having cell surface tumor associated antigen and antigen presenting cells having cell surface molecule as compared to immune activation in the absence of cells having cell surface tumor associated antigen. In some embodiments, immune activation by the recombinant bispecific antibody is greater in the presence of cells having cell surface tumor associated antigen and antigen presenting cells having cell surface molecule as compared to immune activation in the absence of cells having cell surface tumor associated antigen but in the presence of the antigen presenting cells.

[0289] In some embodiments, a recombinant bispecific antibody comprises a target antigen binding domain, wherein the target antigen binding domain specifically binds to a tumor associated antigen; an effector antigen binding domain, wherein the effector antigen binding domain specifically binds to a molecule present on an antigen presenting cell and is not a lipocalin mutein; and an Fc comprising domain; wherein when administered at the minimum anticipated biological effect level of the recombinant bispecific antibody, the biological effect of the recombinant bispecific antibody is increased when the recombinant bispecific antibody is bound to the tumor associated antigen as compared to the biological effect of the recombinant bispecific antibody when the recombinant bispecific antibody is not bound to the tumor associated antigen, but is bound to the molecule on the antigen presenting cell. In some embodiments, the biological effect is immune activation. In some aspects, biological effect of the recombinant bispecific antibody when the recombinant bispecific antibody is bound to the tumor associated antigen is at least two times, five times, or ten times greater than the biological effect of the recombinant bispecific antibody when the recombinant bispecific antibody is not bound to the tumor associated antigen, but is bound to the molecule on the antigen presenting cell.

[0290] In further aspects, an increase in biological effect (e.g., immune activation) is an increase one or more of: a secretion of one or more cytokines, a secretion of one or more chemokines, an expression level of one or more cell surface proteins associated with immune stimulation, and an activity of one or more immune cell functions. In still further aspects, the activity of one or more immune cell functions comprises antibody-dependent cell-mediated cytotoxicity, antibody dependent cellular phagocytosis, or antigen cross-presentation. In some aspects, the increase in immune activation is two times, three times, five times, or ten times greater than immune activation by the recombinant bispecific antibody when the recombinant bispecific antibody is not bound to the tumor associated antigen, but is bound to the molecule on the antigen presenting cell. In further aspects, the recombinant bispecific antibody induces tumor-cell directed antibody-dependent cell-mediated cytotoxicity.

[0291] In some aspects, a binding affinity of the effector antigen binding domain of the recombinant bispecific antibody to the molecule present on the antigen presenting cell is decreased compared to a binding affinity of the effector antigen binding domain of an antibody that lacks the target antigen binding domain, and wherein the binding affinity of the effector antigen binding domain of the recombinant bispecific antibody to the molecule present on the antigen presenting cell in a recombinant form is similar to the binding affinity of the effector antigen binding domain of an antibody that lacks the target antigen binding domain. In further aspects, a Kd of the binding affinity of the effector antigen binding domain of the recombinant bispecific antibody to the molecule present on the antigen presenting cell is increased by two times, five times, ten times, fifty times, or one-hundred times compared to the binding affinity of the effector antigen binding domain of an antibody that lacks the target antigen binding domain. In additional aspects, a Kd for binding of the effector antigen binding domain to the molecule present on the antigen presenting cell is less than 20 nM, less than 100 nM, or less than 500 nM.

[0292] In some aspects, the Fc comprising domain comprises one or more amino acid substitutions that result in an increase in affinity to one or more Fcγ receptors as compared to a wild-type Fc comprising domain. In other aspects, the Fc comprising domain comprises one or more amino acid substitutions that result in a decrease in affinity to one or more Fcγ receptors as compared to a wild-type Fc comprising domain. In some aspects, the Fc comprising domain comprises one or more amino acid substitutions that result in a loss of binding to one or more Fcγ receptors as compared to a wild-type Fc comprising domain.

[0293] These recombinant bispecific antibodies can be designed in many different configurations. In certain embodiments, the bispecific antibodies comprise two different antigen binding domains and an Fc comprising domain. In certain embodiments, the Fc comprising domain comprises an immunoglobulin constant region or portion thereof. The Fc comprising domain comprises at least one mutation that reduces the affinity of the Fc domain for an Fc receptor. In certain aspects, the Fc comprising domain comprises at least 2, 3, 4, 5, 6, 7, 8, 9, 10 or more mutations that reduce the affinity of the comprising domain for an Fc receptor. In certain embodiments, the Fc comprising domain comprises the Fc region of the IgG1 isotype subclass. In certain embodiments, the Fc comprising domain comprises the Fc region of the IgG2 isotype subclass. Alternatively, the Fc comprising domain comprises the Fc region of the IgG2A isotype subclass. The target antigen binding domain is arranged in any configuration that exhibits specific binding to a desired molecule and comprise at least one CDR sequence. For example, in certain embodiments, a binding domain comprises a Fab, an scFv, a heavy chain variable binding region capable of specific binding without a corresponding light chain (e.g., a camelid heavy chain antibody), or a nanobody. The effector antigen binding domain is arranged in any configuration that exhibits specific binding to a desired molecule and comprises at least one CDR sequence or polypeptide that specifically binds to a molecule present on the surface of an APC. Antigen binding domains can either be attached or coupled to the Fc comprising domain. For example, an antigen binding domain is attached to the Fc comprising domain when it is encoded by the same polypeptide (e.g., a fusion protein of two different polypeptides connected by peptide bonds between two amino acids). This attachment can be effected by using peptide synthesis techniques or production in a cell based system. The antigen binding domains can also be coupled to the Fc comprising domain via a covalent linkage that is not a peptide bond, for example, via a polyethylene glycol (PEG) linker.

[0294] FIG. 10 depicts at least three examples of non-limiting embodiments of the recombinant bispecific antibodies. In embodiment I, a target antigen binding domain comprises a light chain variable and constant region 101 and a heavy chain variable and constant region 102. The heavy chain variable and constant region, either comprises an Fc region itself, or is attached to a polypeptide comprising an Fc region 103, which is in turn attached to an effector antigen binding domain comprising an scFv which comprises a heavy chain variable region 104 and a light chain variable region 105. In embodiment I the recombinant bispecific antibody is formed from two separate polypeptides. A single polypeptide encodes the heavy chain variable region 102, the Fc region 103, and the scFv 104 and 105, while a second polypeptide encodes the light chain variable region and constant region 101. The second polypeptide is covalently coupled to the first polypeptide by a disulfide linkage. In this embodiment, the target antigen binding domain approximates a Fab fragment. Each polypeptide comprises a leader sequence (not shown) that directs the polypeptide to the endoplasmic reticulum and the secretory pathway. The leader sequence is ultimately cleaved off of the polypeptides and the secreted molecule lacks the leader sequence. In a certain embodiment, the target antigen binding domain, the Fc region, and the effector antigen binding domain are attached via linkers that allow freedom of movement of the binding domains and prevent steric hindrance by the Fc region. The linkers can be any suitable length greater than 5, 6, 7, 8, 9, 10, 11, 12, 13, 14, or 15 amino acids. In certain embodiments, the linkers are resistant to proteases. In embodiment I, while the target antigen binding domain is depicted at the N-terminus and the effector antigen binding domain scFv at the C-terminus, the orientation can be reversed with the effector antigen binding domain at the N-terminus and the target antigen binding domain at the C-terminus. The target antigen binding domain specifically binds to a tumor associated antigen; the effector antigen binding domain specifically binds to a molecule present on an antigen presenting cell. It is also envisioned that the Fab fragment can be expressed separately from the Fc region-scFv 103-105 and coupled by chemical means through the use of a linker.

[0295] In alternative embodiment II, the recombinant bispecific antibody comprises a single polypeptide with two different antigen binding domains that comprise scFvs. A first scFv comprises a light chain variable region 106 attached to a heavy chain variable region 107, which is in turn attached to a polypeptide comprising an Fc region 108, which is attached to a second scFv comprising a heavy chain variable region 109 and a light chain variable region 110. In certain embodiments, the target antigen binding domain specifically binds to a tumor associated antigen, while the effector antigen binding domain specifically binds to a molecule present on an antigen presenting cell.

[0296] In alternative embodiment III, the recombinant bispecific antibody comprises two different Fab fragments (111 and 112; 114 and 115) that are coupled or attached to a polypeptide comprising an Fc region 113.

[0297] In some aspects, a recombinant bispecific antibody, comprises: a) a target antigen binding domain, wherein the target antigen binding domain specifically binds to a tumor associated antigen; b) an effector antigen binding domain, wherein the effector antigen binding domain specifically binds to an antigen on an antigen presenting cell and wherein the antigen is a molecule on the antigen presenting cell; c) an Fc comprising domain; and d) an immune-stimulatory compound attached to the recombinant bispecific antibody by a linker; wherein the recombinant bispecific antibody induces greater immune cell activation when the recombinant bispecific antibody is bound to the tumor associated antigen and to the antigen on the antigen presenting cell as compared to when the recombinant bispecific antibody is bound to the antigen on the antigen presenting cell but not to the tumor associated antigen.

[0298] In some aspects, a recombinant bispecific antibody, comprises: a) a target antigen binding domain, wherein the target antigen binding domain specifically binds to a tumor associated antigen; b) an effector antigen binding domain, wherein the effector antigen binding domain specifically binds to an antigen on an antigen presenting cell and is an antibody antigen binding domain, wherein the antigen is a molecule on the antigen presenting cell; and c) a domain comprising an Fc region; wherein the recombinant bispecific antibody induces greater immune cell activation when the recombinant bispecific antibody is bound to the tumor associated antigen and to the antigen on the antigen presenting cell as compared to when the recombinant bispecific antibody is bound to the antigen on the antigen presenting cell but not to the tumor associated antigen.

[0299] In some aspects, a recombinant bispecific antibody, comprises: a) a target antigen binding domain, wherein the target antigen binding domain specifically binds to a tumor associated antigen; b) an effector antigen binding domain, wherein the effector antigen binding domain specifically binds to an antigen on an antigen presenting cell and is an antibody antigen binding domain, wherein the antigen is a molecule on the antigen presenting cell; and c) a domain comprising an Fc region; wherein the recombinant bispecific antibody induces greater immune cell activation in the presence of cells having cell surface tumor associated antigen and antigen presenting cells having cell surface antigen as compared to immune cell activation in the absence of cells having cell surface tumor associated antigen.

[0300] In some aspects, a recombinant bispecific antibody, comprising: a) a target antigen binding domain, wherein the target antigen binding domain specifically binds to a tumor associated antigen; b) an effector antigen binding domain, wherein the effector antigen binding domain specifically binds to an antigen on an antigen presenting cell and wherein the antigen is a molecule on the antigen presenting cell; and c) an Fc comprising domain; and d) an immune-stimulatory compound attached to the recombinant bispecific antibody by a linker; wherein the recombinant bispecific antibody induces greater immune cell activation in the presence of cells having cell surface tumor associated antigen and antigen presenting cells having cell surface antigen as compared to immune cell activation in the absence of cells having cell surface tumor associated antigen.

[0301] In some aspects, a recombinant bispecific antibody, comprises: a) a target antigen binding domain, wherein the target antigen binding domain specifically binds to a tumor associated antigen; b) an effector antigen binding domain, wherein the effector antigen binding domain specifically binds to an antigen on an antigen presenting cell and wherein the antigen is a molecule on the antigen presenting cell; c) an Fc comprising domain; and d) an immune-stimulatory compound attached to the recombinant bispecific antibody by a linker; wherein the recombinant bispecific antibody induces greater immune cell activation when the recombinant bispecific antibody is bound to the tumor associated antigen and to the antigen on the antigen presenting cell as compared to when the recombinant bispecific antibody is bound to the antigen on the antigen presenting cell but not to the tumor associated antigen.

[0302] In some aspects, a recombinant bispecific antibody, comprises: a) a target antigen binding domain, wherein the target antigen binding domain specifically binds to a tumor associated antigen; b) an effector antigen binding domain, wherein the effector antigen binding domain specifically binds to an antigen on an antigen presenting cell and is an antibody antigen binding domain, wherein the antigen is a molecule on the antigen presenting cell; and c) a domain comprising an Fc region; wherein the recombinant bispecific antibody induces greater immune cell activation when the recombinant bispecific antibody is bound to the tumor associated antigen and to the antigen on the antigen presenting cell as compared to when the recombinant bispecific antibody is bound to the antigen on the antigen presenting cell but not to the tumor associated antigen.

[0303] In some aspects, a recombinant bispecific antibody, comprises: a) a target antigen binding domain, wherein the target antigen binding domain specifically binds to a tumor associated antigen; b) an effector antigen binding domain, wherein the effector antigen binding domain specifically binds to an antigen on an antigen presenting cell and is an antibody antigen binding domain, wherein the antigen is a molecule on the antigen presenting cell; and c) a domain comprising an Fc region; wherein the recombinant bispecific antibody induces greater immune cell activation in the presence of cells having cell surface tumor associated antigen and antigen presenting cells having cell surface antigen as compared to immune cell activation in the absence of cells having cell surface tumor associated antigen.

[0304] In some aspects, a recombinant bispecific antibody, comprising: a) a target antigen binding domain, wherein the target antigen binding domain specifically binds to a tumor associated antigen; b) an effector antigen binding domain, wherein the effector antigen binding domain specifically binds to an antigen on an antigen presenting cell and wherein the antigen is a molecule on the antigen presenting cell; and c) an Fc comprising domain; and d) an immune-stimulatory compound attached to the recombinant bispecific antibody by a linker; wherein the recombinant bispecific antibody induces greater immune cell activation in the presence of cells having cell surface tumor associated antigen and antigen presenting cells having cell surface antigen as compared to immune cell activation in the absence of cells having cell surface tumor associated antigen.

[0305] In some embodiments, the Fc comprising domain is linked C-terminal to the target antigen binding domain and N-terminal to the effector antigen binding domain. In some embodiments, the linker links the immune-stimulatory compound to the Fc comprising domain.

[0306] In some embodiments, the immune cell activation is measured by a cytokine release assay.

[0307] In some embodiments, the immune cell activation by the recombinant bispecific antibody when the recombinant bispecific antibody is bound to the tumor associated antigen and to the antigen on the antigen presenting cell is at least two times, five times, or ten times greater than immune activation by the recombinant bispecific antibody when the recombinant bispecific antibody is bound to the antigen on the antigen presenting cell but not to the tumor associated antigen as measured by the cytokine release assay.

[0308] In some embodiments, the immune cell activation by the recombinant bispecific antibody in the presence of cells having cell surface tumor associated antigen and antigen presenting cells having cell surface antigen is at least two times, five times, or ten times greater than immune cell activation by the recombinant bispecific antibody in the absence of the cells having cell surface tumor associated antigen as measured by the cytokine release assay.

[0309] In some embodiments, the immune cell activation comprises an increase in one or more of: a) a secretion of one or more cytokines as measured by the cytokine release assay, b) a secretion of one or more chemokines as measured by an ELISA immunoassay, c) an expression level of one or more cell surface proteins associated with immune stimulation as measured by FACS, and d) an activity of one or more immune cell functions.

[0310] In some embodiments, the activity of one or more immune cell functions comprises antibody-dependent cell-mediated cytotoxicity as measured by an ADCC assay, antibody dependent cellular phagocytosis as measured by an ADCP assay, or antigen cross-presentation as measured by a cross-presentation assay.

[0311] In some embodiments, the recombinant bispecific antibody induces tumor-cell directed antibody-dependent cell-mediated cytotoxicity.

[0312] In some aspects, method of making a recombinant bispecific antibody comprises: a) producing an antibody construct comprising: i) a target antigen binding domain, wherein the target antigen binding domain specifically binds to a tumor associated antigen; ii) an effector antigen binding domain, wherein the effector antigen binding domain specifically binds to an antigen on an antigen presenting cell and the antigen is a molecule on the antigen presenting cell, wherein the antigen is a molecule on the antigen presenting cell; iii) an Fc comprising domain; and b) linking an immune-stimulatory compound to the antibody construct, wherein the recombinant bispecific antibody induces greater immune cell activation when the recombinant bispecific antibody is bound to the tumor associated antigen and to the antigen on the antigen presenting cell as compared to when the recombinant bispecific antibody is bound to the antigen on the antigen presenting cell but not to the tumor associated antigen.

### Constant Regions and Fe Regions

[0313] The recombinant bispecific antibodies described herein comprise a constant region, or portion thereof, in addition to a variable region (or CDR sequences derived from a variable region). The heavy chain constant region (CH) comprises three or four domains abbreviated CH1, CH2, CH3, and CH4, depending on the isotype of the constant region. The domains are located at the C-terminal end of the full heavy chain polypeptide, C-terminal to the variable region. The light chain constant region (CL) is much smaller that the CH and is located at the C-terminal end of the full light chain polypeptide, C-terminal to the variable region. In certain embodiments, the recombinant bispecific antibodies herein comprise a constant region lacking a CH4 region. The constant region is highly conserved and comprises different isotypes, that are associated with slightly different functions and properties. In certain embodiments, the constant region is not required for antibody binding to a target antigen. In certain embodiments, the constant regions of the recombinant bispecific antibodies, both heavy and light chains are not required for antibody binding to a target antigen. In certain embodiments, the recombinant bispecific antibodies lack one or more of a light chain constant region, heavy chain constant region, or both. Most monoclonal antibodies are of an IgG isotype; which is further divided into four subclasses IgG1, IgG2, IgG3, and IgG4. In certain embodiments, the recombinant bispecific antibodies comprise any IgG subclass. In certain embodiments, the IgG subclass comprises IgG. In certain embodiments, the IgG subclass comprises IgG2. In certain embodiments, the IgG subclass comprises IgG3. In certain embodiments, the IgG subclass comprises IgG4.

[0314] The recombinant bispecific antibodies described herein comprise an Fc comprising domain in addition to target and effector antigen binding domains. Natural antibodies comprise a fragment crystallizable region (Fc region) that is responsible for binding to complement and Fc receptors. The Fc region comprises the CH2, CH3, and CH4 regions of the antibody molecule, and is responsible for activating complement and antibody dependent cell cytotoxicity (ADCC). Much of the variability in Fc function can be attributed to the CH2 region. The Fc region also contributes to an antibody's serum half-life. IgG isotype subclass Fc regions exhibit varying affinity for Fc receptors. IgG1 and IgG3 exhibit high affinity binding to all Fc receptors, both with respect to affinity and amount of different Fc receptors. IgG2, however, exhibits the lowest binding affinity toward various Fc receptors, with IgG4 showing an intermediate binding affinity. In certain embodiments, the Fc region is attached to one or both of the antigen binding domains. In certain embodiments, the recombinant bispecific antibodies comprise an Fc region derived from the IgG2 isotype subclass.

[0315] There are several different Fc receptors with varying affinity for the antibody Fc region, ability to activate signaling though the Fc receptor, and expression on immune cells. For example, FcγRI possess a very high affinity for IgG (KD of approximately 1×10-8 M).

[0316] The Fc comprising domain of the recombinant bispecific antibodies comprises one or more, two or more, three or more, or four or more amino acid substitutions that decrease binding of the antibody to an Fc receptor. In certain embodiments, the Fc receptor comprises FcγRI (CD64), FcγRIIA (CD32), FcγRIIIA (CD16a), FcγRIIIB (CD16b), or any combination thereof. In certain embodiments, the Fc comprising domain of the recombinant bispecific antibodies comprise one or more amino acid substitutions that increase the serum half-life of the antibody. In certain embodiments, the one or more amino acid substitutions that increase the serum half-life of the antibody increase affinity of the antibody to the neonatal Fc receptor (FcRn). In order to decrease binding affinity of an Fc region to Fc receptor the Fc comprising domain may comprise one or more mutations that has the effect of reducing the affinity of the Fc region to an Fc receptor. In certain embodiments, the one or more mutations comprise any one or more of IgG1 heavy chain mutations corresponding to E233P, L234V, L234A, L235A, L235E, AG236, G237A, E318A, K320A, K322A, A327G, A330S, or P331S according to the EU index of Kabat numbering.

[0317] The Fc comprising domain of the recombinant bispecific antibodies comprises one, two, three, four or more amino acid substitutions that decrease binding of the antibody to an Fc receptor. The one, two, three, four or more amino acid substitutions decrease binding by at least two fold, three fold, four fold, five fold or ten fold. In certain embodiments, the one, two, three, four or more amino acid substitutions completely abolish binding to an Fc receptor (Fc null). In certain embodiments, the one, two, three, four or more amino acid substitutions are differences compared to any one of SEQ ID NO: 1314, SEQ ID NO: 1315, SEQ ID NO: 1316, or SEQ ID NO: 1317. In certain embodiments, the one, two, three, four or more amino acid substitutions are differences compared to any one of SEQ ID NO: 1314, SEQ ID NO: 1315, SEQ ID NO: 1316, or SEQ ID NO: 1317. In certain embodiments, one, two, three, four or more amino acid substitutions are differences compared to any one of SEQ ID NO: 1319, SEQ ID NO: 1320, SEQ ID NO: 1321, or SEQ ID NO: 1322. In certain embodiments, one, two, three, four or more amino acid substitutions are differences compared to any one of SEQ ID NO: 1319, SEQ ID NO: 1320, SEQ ID NO: 1321, or SEQ ID NO: 1322. In certain embodiments, the Fc comprising domain comprises an amino sequence at least 80%, 90%, 95%, 98%, 99%, or 100% identical to the amino acid sequence set forth in SEQ ID NO: 1313. In certain embodiments, the Fc comprising domain comprises an amino sequence at least 80%, 90%, 95%, 98%, 99%, or 100% identical to the amino acid sequence set forth in SEQ ID NO: 1318.

[0318] Alternatively, an amino acid change in an Fc comprising domain of the recombinant bispecific antibodies can allow the recombinant bispecific antibody to bind to at least one Fc receptor with greater affinity compared to a wild-type Fc region. An Fc comprising domain can comprise an amino acid sequence having at least one, two, three, four, five, six, seven, eight, nine or ten modifications but not more than 40, 35, 30, 25, 20, 15 or 10 modifications of the amino acid sequence relative to the natural or original amino acid sequence. An Fc comprising domain can be an Fc region of an anti-CD40 antibody.

[0319] The Fc comprising domain of the recombinant bispecific antibody can comprise a sequence of the IgG1 isoform that has been modified from the wild-type IgG sequence. A modification can comprise a substitution at more than one amino acid residue such as at 5 different amino acid residues including L235V/F243L/R292P/Y300L/P396L (IgG1VLPLL). The numbering of amino acids residues described herein is according to the EU index as in Kabat. The 5 amino acid residues can be located in a portion of a recombinant bispecific antibody sequence which can encode an Fc comprising domain of the recombinant bispecific antibody and in particular, can be located in portions of the Fc region that can bind to Fc receptors (i.e., the Fc domain). A modification can comprise a substitution at more than one amino acid residue such as at 2 different amino acid residues including S239D/I332E (IgG1DE) according to the EU index of Kabat numbering. The 2 amino acid residues can be located in a portion of a recombinant bispecific antibody sequence which encodes an Fc comprising domain of the recombinant bispecific antibody and in particular, are located in portions of the Fc region that can bind to Fc receptors (i.e., the Fc domain). A modification can comprise a substitution at more than one amino acid residue such as at 3 different amino acid residues including S298A/E333A/K334A (IgG1AAA) according to the EU index of Kabat numbering. The 3 amino acid residues can be located in a portion of a recombinant bispecific antibody sequence which can encode an Fc comprising domain of the recombinant bispecific antibody and in particular, can be located in portions of the Fc region that can bind Fc receptors (i.e., the Fc domain).

[0320] The Fc comprising domain can be from a monoclonal anti-CD40 human antibody comprising a sequence of the IgG isoform that has been modified from the wild-type IgG sequence. A modification can comprise a substitution at more than one amino acid residue such as at 5 different amino acid residues including L235V/F243L/R292P/Y300L/P396L (SBT-040-G1VLPLL). The numbering of amino acids residues described herein is according to the EU index as in Kabat. The 5 amino acid residues can be located in a portion of an antibody sequence which can encode an Fc region of the antibody and in particular, can be located in portions of the Fc region that can bind to Fc receptors (i.e., the Fc domain). A modification can comprise a substitution at more than one amino acid residue such as at 2 different amino acid residues including S239D/I332E (SBT-040-G1DE) according to the EU index of Kabat numbering. The 2 amino acid residues can be located in a portion of an antibody sequence which encodes an Fc region of the antibody and in particular, are located in portions of the Fc region that can bind to Fc receptors (i.e., the Fc domain). A modification can comprise a substitution at more than one amino acid residue such as at 3 different amino acid residues including S298A/E333A/K334A (SBT-040-G1AAA) according to the EU index of Kabat numbering. The 3 amino acid residues can be located in a portion of an antibody sequence which can encode an Fc region of the antibody and in particular, can be located in portions of the Fc region that can bind to Fc receptors (i.e., the Fc domain).

[0321] Binding of Fc receptors to an Fc comprising domain can be affected by amino acid substitutions. For example, a recombinant bispecific antibody can comprise an amino acid sequence of a heavy chain of human anti-CD40 monoclonal antibody with modifications to a wild-type IgG1 Fc domain (L235V/F243L/R292P/Y300L/P396L). Binding of some Fc receptors to this Fc comprising domain with the L235V/F243L/R292P/Y300L/P396L amino acid modifications can be enhanced compared to wild-type as result of the L235V/F243L/R292P/Y300L/P396L amino acid modifications. The recombinant bispecific antibody can comprise an amino acid sequence of a heavy chain of human anti-CD40 monoclonal antibody with modifications to a wild-type IgG1 Fc domain (S239D/I332E). Binding of Fc receptors to the Fc comprising domain of the recombinant bispecific antibody can be enhanced compared to wild-type as a result of the S239D/I332E amino acid modification. The recombinant bispecific antibody can comprise an amino acid sequence of a heavy chain of a human anti-CD40 monoclonal antibody with modifications to a wild-type IgG1 Fc domain (S298A/E333A/K334A). Binding of Fc receptors to a Fc comprising domain of a recombinant bispecific antibody can be enhanced compared to wild-type as a result of the S298A/E333A/K334A amino acid modification.

[0322] In some embodiments, the Fc comprising domain has one or more amino acid substitutions that decrease the binding affinity to one or more Fcγ receptors as compared to a wild-type Fc comprising domain.

[0323] In some embodiments, the Fc comprising domain is linked to the target antigen binding domain and to the effector antigen binding domain.

[0324] In some embodiments, the Fc comprising domain comprises one or more amino acid substitutions that reduce the affinity of the Fc comprising domain to an Fc receptor compared to the affinity of a reference Fc comprising domain to the Fc receptor in the absence of the one or more amino acid substitutions.

[0325] In some embodiments, reference Fc comprising domain is selected from the group consisting of an Fc comprising domain having the amino acid sequence of SEQ ID NO: 1314, SEQ ID NO: 1315, SEQ ID NO: 1316, and SEQ ID NO: 1317.

[0326] In some embodiments, reference Fc comprising domain comprises an amino acid sequence selected from the group consisting of SEQ ID NO: 1319, SEQ ID NO: 1320, SEQ ID NO: 1321, and SEQ ID NO: 1322.

[0327] In some embodiments, the Fc comprising domain comprises a human IgG₁ Fc Region. In some embodiments, the one or more amino acid substitutions comprise L234A, L235A, G237A, and K322A, according to the EU index of Kabat. In some embodiments, the one or more amino acid substitutions comprise E233P, L234V, L235A, AG236, A327G, A330S, and P331S, according to the EU index of Kabat. In some embodiments, the Fc comprising domain comprises a human IgG₂ Fc Region.

[0328] In some embodiments, the one or more amino acid substitutions comprises K322A, according to the EU index of Kabat.

[0329] In some embodiments, the Fc comprising domain comprises a human IgG₂ₐ Fc Region In some embodiments, the one or more amino acid substitutions comprises L235E, E318A, K320A, K322A, according to the EU index of Kabat.

[0330] In some embodiments, the Fc comprising domain is an Fc null. In some embodiments, the Fc comprising domain has the amino acid sequence of SEQ ID NO: 1313.

[0331] In some embodiments, the Fc comprising domain comprises the amino acid sequence of SEQ ID NO: 1318.

[0332] In some embodiments, the Fc comprising domain is linked C-terminal to the target antigen binding domain and has the amino acid sequence of SEQ ID NO: 1311.

### Antigen Binding Domains

[0333] In certain embodiments, the recombinant bispecific antibodies comprise a target and effector antigen binding domain. Each antigen binding domain comprises one or more complementarity determining regions (CDRs). A CDR is a part of an immunoglobulin (antibody) variable region that is primarily responsible for the antigen binding specificity of the antibody. CDR regions are highly variable from one antibody to the next, even when the antibody specifically binds the same target or epitope. A heavy chain variable region comprises three CDR regions, abbreviated HCDR1, HCDR2, and HCDR3; and a light chain variable region comprises three CDR regions, abbreviated LCDR1, LCDR2, and LCDR3. These CDR regions are ordered consecutively in the variable region with the CDR1 being the most N-terminal and the CDR3 being the most C-terminal. Interspersed between the CDRs are framework regions which contribute to the structure and display much less variability than the CDR regions. A heavy chain variable region comprises four framework regions, abbreviated HFR1, HFR2, HFR3, and HFR4; and a light chain variable region comprises four framework regions, abbreviated LFR1, LFR2, LFR3, and LFR4. Complete full sized bivalent antibodies comprising two heavy and light chains will comprise: 12 CDRs, with three unique heavy chain CDRs and three unique light chain CDRs; 16 FR regions, with four unique heavy chain FR regions and four unique light chain FR regions. In certain embodiments, the antibodies described herein minimally comprise three heavy chain CDRs. In certain embodiments, the antibodies described herein minimally comprise three light chain CDRs. In certain embodiments, the antibodies described herein minimally comprise three heavy chain CDRs and three light chain CDRs. The CDRs may be expressed as an scFv or a traditional heavy chain and light chain pair. CDRs are identified from sequences using different numbering systems such as the Kabat or the IMGT numbering systems. In certain embodiments, the antibodies described herein comprise variable regions of non-human origin. In certain embodiments, the antibodies described herein comprise CDRs of non-human origin. In certain embodiments, the antibodies described herein comprise variable regions of mouse origin. In certain embodiments, the antibodies described herein comprise CDRs of mouse origin.

[0334] In some embodiments, the tumor associated antigen is an antigen selected from the group consisting of CD5, CD19, CD20, CD25, CD37, CD30, CD33, CD45, CAMPATH-1, HLD-DR, carcinoembryonic antigen (CEA), TAG-72, EpCAM, MUC1, MUC15, folate-binding protein, A33, G250, prostate-specific membrane antigen (PSMA), ferritin, GD2, GD3, GM2, Le^{y}, CA-125, CA19-9, epidermal growth factor, p185HER2, IL-2 receptor, tenascin, a metalloproteinase, endosialin, vascular endothelial growth factor, avB3, WT1, LMP2, HPV E6, HPV E7, EGFRvIII, Her-2/neu, MAGE A3, p53 nonmutant, NY-ESO-1, MelanA/MART1, Ras mutant, gp100, p53 mutant, PR1, bcr-abl, tyrosinase, survivin, PSA, hTERT, a Sarcoma translocation breakpoint fusion protein, EphA2, PAP, ML-IAP, AFP, ERG, NA17, PAX3, ALK, androgen receptor, cyclin B1, polysialic acid, MYCN, RhoC, TRP-2, fucosyl GM1, mesothelin (MSLN), PSCA, MAGE A1, MAGE-A3, sLe(animal), CYP1B1, PLAV1, GM3, BORIS, Tn, GloboH, ETV6-AML, NY-BR-1, RGS5, SART3, STn, Carbonic anhydrase IX, PAX5, OY-TES1, Sperm protein 17, LCK, HMWMAA, AKAP-4, SSX2, XAGE 1, B7H3, Legumain, Tie 3, Page4, VEGFR2, MAD-CT-1, PDGFR-B, MAD-CT-2, ROR2, CMET, HER3, EPCAM, CA6, NAPI2B, TROP2, CLDN18.2, fibroblast activation protein (FAP), RON, LY6E, FRA, DLL3, PTK7, LIV1, ROR1, Fos-related antigen 1, VEGFR, endoglin, PD-L1, CD204, CD206, CD301, VTCN1, and VISTA. In some embodiments, the tumor associated antigen is Her2/neu or p185HER2.

### Target Antigen Binding Domain

[0335] The recombinant bispecific antibodies comprise a target antigen binding domain that specifically binds to a tumor associated antigen. As described herein, a “tumor associated antigen” refers to a molecular marker that is can be expressed by a neoplastic tumor cell and/or within a tumor microenvironment. For example, a tumor associated antigen can be an antigen expressed on a cell associated with a tumor, such as a neoplastic cell, stromal cell, endothelial cell, fibroblast, or tumor-infiltrating immune cell. For example, the tumor associated antigen Her2/Neu is overexpressed by certain types of breast and ovarian cancer. A tumor antigen may also be ectopically expressed by a tumor and contribute to deregulation of the cell cycle, reduced apoptosis, metastasis, or escape from immune surveillance. Tumor associated antigens are generally proteins or polypeptides derived therefrom, but can be glycans, lipids, or other small organic molecules. Additionally, a tumor antigen can arise through increases or decreases in post-translational processing exhibited by a cancer cell compared to a normal cell, for example, protein glycosylation, protein lipidation, protein phosphorylation, or protein acetylation. In certain embodiments, the target antigen binding domain specifically binds to a tumor associated antigen selected from the group consisting of CD5, CD19, CD20, CD25, CD37, CD30, CD33, CD45, CAMPATH-1, HLD-DR, carcinoembryonic antigen (CEA), TAG-72, EpCAM, MUC1, folate-binding protein, A33, G250, prostate-specific membrane antigen (PSMA), ferritin, GD2, GD3, GM2, Ley, CA-125, CA19-9, epidermal growth factor, p185HER2, IL-2 receptor, fibroblast activation protein, tenascin, a metalloproteinase, endosialin, vascular endothelial growth factor, avB3, WT1, LMP2, HPV E6, HPV E7, EGFRvIII, Her-2/neu, MAGE A3, p53 nonmutant, NY-ESO-1, MelanA/MART1, Ras mutant, gp100, p53 mutant, PR1, bcr-abl, tyrosinase, survivin, PSA, hTERT, a Sarcoma translocation breakpoint protein, EphA2, PAP, ML-IAP, AFP, ERG, NA17, PAX3, ALK, androgen receptor, cyclin B1, polysialic acid, MYCN, RhoC, TRP-2, fucosyl GM1, mesothelin (MSLN), PSCA, MAGE A1, sLe(animal), CYP1B1, PLAV1, GM3, BORIS, Tn, GloboH, ETV6-AML, NY-BR-1, RGS5, SART3, STn, Carbonic anhydrase IX, PAX5, OY-TES1, Sperm protein 17, LCK, HMWMAA, AKAP-4, SSX2, XAGE 1, B7-H3, Legumain, Tie 3, Page4, VEGFR2, MAD-CT-1, PDGFR-B, MAD-CT-2, ROR2, CMET, HER3, EPCAM, CA6, NAPI2B, TROP2, CLDN18.2, FAP, RON, LY6E, FRA, DLL3, PTK7, LIV1, ROR1, Fos-related antigen 1, VEGFR, endoglin, PD-L, CD204, CD206, CD301, VTCN1, or VISTA.

[0336] In certain embodiments, the target antigen binding domain specifically binds to a tumor associated antigen selected from the group consisting of GD2, GD3, GM2, Ley, polysialic acid, fucosyl GM1, GM3, Tn, STn, sLe(animal), or GloboH or having an amino acid sequence comprising at least 80%, 90%, 95%, 97%, 98%, 99% or 100% homology to CD5, CD19, CD20, CD25, CD37, CD30, CD33, CD45, CAMPATH-1, HLD-DR, carcinoembryonic antigen (CEA), TAG-72, EpCAM, MUC1, folate-binding protein, A33, G250, prostate-specific membrane antigen (PSMA), ferritin, CA-125, CA19-9, epidermal growth factor, p185HER2, IL-2 receptor, tenascin, a metalloproteinase, endosialin, vascular endothelial growth factor, avB3, WT1, LMP2, HPV E6, HPV E7, EGFRvIII, Her-2/neu, MAGE A3, p53 nonmutant, NY-ESO-1, MelanA/MART1, Ras mutant, gp100, p53 mutant, PR1, bcr-abl, tyrosinase, survivin, PSA, hTERT, a Sarcoma translocation breakpoint protein, EphA2, PAP, ML-IAP, AFP, ERG, NA17, PAX3, ALK, androgen receptor, cyclin B1, MYCN, RhoC, TRP-2, mesothelin (MSLN), PSCA, MAGE A1, CYP1B1, PLAV1, BORIS, ETV6-AML, NY-BR-1, RGS5, SART3, Carbonic anhydrase IX, PAX5, OY-TES1, Sperm protein 17, LCK, HMWMAA, AKAP-4, SSX2, XAGE 1, B7-H3, Legumain, Tie 3, Page4, VEGFR2, MAD-CT-1, PDGFR-B, MAD-CT-2, ROR2, CMET, HER3, EPCAM, CA6, NAPI2B, TROP2, CLDN18.2, fibroblast activation protein (FAP), RON, LY6E, FRA, DLL3, PTK7, LIV1, ROR1, Fos-related antigen 1, VEGFR, endoglin, PD-L1, CD204, CD206, CD301, VTCN1, or VISTA. In certain embodiments, the target antigen binding domain specifically binds to a tumor associated antigen comprising Her2/Neu (CD340). In certain embodiments, the target antigen binding domain specifically binds to a tumor associated antigen comprising at least 80%, 90%, 95%, 97%, 98%, 99% or 100% homology to CD5, CD19, CD20, CD25, CD37, CD30, CD33, CD45, CAMPATH-1, HLD-DR, carcinoembryonic antigen, TAG-72, EpCAM, MUC1, folate-binding protein, A33, G250, prostate-specific membrane antigen, ferritin, GD2, GD3, GM2, Le^{y}, CA-125, CA19-9, epidermal growth factor, p185HER2, IL-2 receptor, de2-7 EGFR, fibroblast activation protein, tenascin, metalloproteinases, endosialin, vascular endothelial growth factor, avB3, WT1, LMP2, HPV E6 E7, EGFRvIII, Her-2/neu, idiotype, MAGE A3, p53 nonmutant, NY-ESO-1, PSMA, GD2, CEA, MelanA/MART1, Ras mutant, gp100, p53 mutant, PR1, bcr-abl, tyronsinase, survivin, PSA, hTERT, Sarcoma translocation breakpoints, EphA2, PAP, ML-IAP, AFP, ERG, NA17, PAX3, ALK, androgen receptor, cyclin B, polysialic acid, MYCN, RhoC, TRP-2, fucosyl GM1, mesothelin, PSCA, MAGE A1, sLe(animal), CYP1B1, PLAV1, GM3, BORIS, Tn, GloboH, ETV6-AML, NY-BR-1, RGS5, SART3, STn, Carbonic anhydrase IX, PAX5, OY-TES1, Sperm protein 17, LCK, HMWMAA, AKAP-4, SSX2, XAGE 1, B7H3, Legumain, Tie 3, Page4, VEGFR2, MAD-CT-1, PDGFR-B, MAD-CT-2, ROR2, CMET, HER3, EPCAM, MSLN, CA6, NAPI2B, TROP2, CLDN18.2, FAP, RON, LY6E, FRA, DLL3, PTK7, LIV1, ROR1, Fos-related antigen 1, VEGFR, endoglin, PDL-1, CD204, CD206, CD301, VTCN1, or VISTA.

[0337] The antigen binding domain that specifically binds a tumor associated antigen can be derived from any known antibody with the ability to bind to an antigen shown to be expressed by cancer cells. In certain embodiments, the target antigen binding domain is derived from an antibody selected from the group of Etaracizumab (Abegrin), Tacatuzumab tetraxetan, Bevacizumab (Avastin), Labetuzumab, Cetuximab (Erbitux), Obinutuzumab (Gazyva), Trastuzumab (Herceptin), Clivatuzumab, Rituximab (MabThera, Rituxan), Gemtuzumab of Gemtuzumab ozogamicin (Mylotarg), Girentuximab (Rencarex), or Nimotuzumab (Theracim, Theraloc). In certain embodiments, the target antigen binding domain is derived from Pertuzumab (Perjeta). A target antigen binding domain is derived from a known antibody when it comprises one or more CDR sequences identical to one or more CDR sequences of the known antibody. In certain embodiments, a target antigen binding domain is derived from a known antibody when it comprises three HCDR sequences identical to three HCDR sequences of the known antibody. In certain embodiments, a target antigen binding domain is derived from a known antibody when it comprises three LCDR sequences identical to three LCDR sequences of the known antibody.

[0338] In certain embodiments, the target antigen binding domain of the recombinant bispecific antibody is derived from pertuzumab. Pertuzumab is a monoclonal antibody that specifically binds the Her2/Neu antigen. The heavy chain amino acid sequence for pertuzumab is set forth in SEQ ID NO: 11; the light chain amino acid sequence for pertuzumab is set forth in SEQ ID NO: 16. In certain embodiments, the target antigen binding domain comprises a CDR sequence identified from either of SEQ ID NO: 11 or SEQ ID NO: 16 identified using the Kabat, IMGT or Chothia method. In certain embodiments, the target antigen binding domain comprises an amino acid sequence with at least 80%, 90%, 95%, 98%, 99%, or 100% identity to SEQ ID NO: 11. In certain embodiments, the target antigen binding domain comprises an amino acid sequence with at least 80%, 90%, 95%, 98%, 99%, or 100% identity to SEQ ID NO: 16. In certain embodiments, the target antigen binding domain comprises an amino acid sequence with at least 80%, 90%, 95%, 98%, 99%, or 100% identity to SEQ ID NO: 11 and SEQ ID NO: 16.

[0339] The heavy chain variable region amino acid sequence for pertuzumab is set forth in SEQ ID NO: 12; the light chain variable region amino acid sequence for pertuzumab is set forth in SEQ ID NO: 17. In certain embodiments, the target antigen binding domain comprises a CDR sequence identified from either of SEQ ID NO: 12 or SEQ ID NO: 17 identified using the Kabat, IMGT or Chothia method. In certain embodiments, the target antigen binding domain comprises an amino acid sequence with at least 80%, 90%, 95%, 98%, 99%, or 100% identity to SEQ ID NO: 12. In certain embodiments, the target antigen binding domain comprises an amino acid sequence with at least 80%, 90%, 95%, 98%, 99%, or 100% identity to SEQ ID NO: 17. In certain embodiments, the target antigen binding domain comprises an amino acid sequence with at least 80%, 90%, 95%, 98%, 99%, or 100% identity to SEQ ID NO: 12 and SEQ ID NO: 17.

[0340] In certain embodiments, the target antigen binding domain may comprise the CDR sequence of pertuzumab. The amino acid sequence of the HCDR1 of pertuzumab is set forth in SEQ ID NO: 13; the amino acid sequence of the HCDR2 of pertuzumab is set forth in SEQ ID NO: 14; the amino acid sequence of the HCDR3 of pertuzumab is set forth in SEQ ID NO: 15; the amino acid sequence of the LCDR1 of pertuzumab is set forth in SEQ ID NO: 18; the amino acid sequence of the LCDR2 of pertuzumab is set forth in SEQ ID NO: 19; and the amino acid sequence of the LCDR3 of pertuzumab is set forth in SEQ ID NO: 20. In certain embodiments, the target antigen binding domain comprises any one of SEQ ID NO: 13-SEQ ID NO: 15 and SEQ ID NO: 18-SEQ ID NO: 20. In certain embodiments, the target antigen binding domain comprises all of SEQ ID NO: 13-SEQ ID NO: 15 and SEQ ID NO: 18-SEQ ID NO: 20. In certain embodiments, the target antigen binding domain comprises any one of SEQ ID NO: 13-SEQ ID NO: 15. In certain embodiments, the target antigen binding domain comprises any one of SEQ ID NO: 18-SEQ ID NO: 20. In certain embodiments, the target antigen binding domain comprises a sequence at least all of SEQ ID NO: 13 and SEQ ID NO: 15. In certain embodiments, the target antigen binding domain comprises all of SEQ ID NO: 18 and SEQ ID NO 20. The CDR sequences above may be incorporated into the target antigen binding domain by any method of recombinant DNA technology. The incorporated CDRs can have any amount of amino acid sequence identity to any one of SEQ ID NO: 13-SEQ ID NO: 15 and SEQ ID NO: 18-SEQ ID NO: 20 that still retains the specific binding of pertuzumab, for example, 80%, 90%, 95%, 98%, 99%, or 100% identity.

[0341] In certain embodiments, the recombinant bispecific antibody comprises a target antigen binding domain and an Fc region that are attached in a single polypeptide, resulting in a fusion. In certain embodiments, the recombinant bispecific antibody comprises a target antigen binding domain and an Fc comprising domain as a single polypeptide, which is a fusion. In certain embodiments, the target antigen binding domain attached to the Fc region comprises an amino acid sequence set forth in SEQ ID NO: 1311. In certain embodiments, the target antigen binding domain attached to the Fc region comprises an amino acid sequence at least 80%, 90%, 95%, 98%, 99%, or 100% identical to that set forth in SEQ ID NO: 1311.

[0342] In certain embodiments, the recombinant bispecific antibody comprises a target antigen binding with at least 80%, 90%, 95%, 98%, 99%, or 100% sequence identity to 6, 7, 8, 9, 10, 11, 12 or more contiguous amino acids between amino acid 20 and amino acid 110 of SEQ ID NO: 12 and at least 80%, 90%, 95%, 98%, 99%, or 100% sequence identity to 6, 7, 8, 9, 10, 11, 12 or more contiguous amino acids between amino acid 20 and amino acid 105 of SEQ ID NO: 17.

[0343] In some embodiments, the target antigen binding domain comprises an immunoglobulin heavy chain variable region or antigen binding fragment thereof and an immunoglobulin light chain variable region or antigen binding fragment thereof.

[0344] In some embodiments, the target antigen binding domain comprises a single chain variable region fragment (scFv).

[0345] In some embodiments, the target antigen binding domain comprises the following CDRs: a) HCDR1 comprising an amino acid sequence of SEQ ID NO: 13; b) HCDR2 comprising an amino acid sequence of SEQ ID NO: 14; c) HCDR3 comprising an amino acid sequence of SEQ ID NO: 15; d) LCDR1 comprising an amino acid sequence of SEQ ID NO: 18; e) LCDR2 comprising an amino acid sequence of SEQ ID NO: 19; and f) LCDR3 comprising an amino acid sequence of SEQ ID NO: 20; and wherein the recombinant bispecific antibody specifically binds to Her2/neu or p185HER2.

[0346] In some embodiments, the target antigen binding domain comprises: a) a VH sequence having at least 80% sequence identity to an amino acid sequence of SEQ ID NO: 12; and b) a VL sequence having at least 80% sequence identity to an amino acid sequence of SEQ ID NO: 17. In some embodiments, the target antigen binding domain comprises: a) a heavy chain sequence having at least 80% sequence identity to an amino acid sequence of SEQ ID NO: 11; and b) a light chain sequence having at least 80% sequence identity to an amino acid sequence of SEQ ID NO: 16.

[0347] In some embodiments, the target antigen binding domain comprises at least 80% sequence identity to the amino acid sequence between amino acid 20 and amino acid 110 of SEQ ID NO: 12 and at least 80% sequence identity to the amino acid sequence between amino acid 20 and amino acid 105 of SEQ ID NO: 17; and wherein the recombinant bispecific antibody specifically binds to Her2/neu or p185HER2.

### Effector Antigen Binding Domain

[0348] The recombinant bispecific antibodies comprise an effector antigen binding domain. The effector antigen binding domain specifically binds to a molecule present on an antigen presenting cell (APC), such as a dendritic cell. Antigen presenting cells regulate immune response by priming, and/or sustaining cell mediated immunity by T cells (both helper and cytotoxic T cells). As such, attracting antigen presenting cells to tumors and cancerous cells has the potential to boost cancer immunity and provide an adjuvant to monoclonal antibody therapy. This can be achieved by either providing activating signals to the APC (e.g., agonizing a costimulatory molecule) or blocking inhibitory signals (e.g., antagonizing a checkpoint inhibitor). In certain embodiments, the molecule present on the antigen presenting cell comprises a costimulatory molecule or other molecule that results in activation of the APC upon ligand binding. In certain embodiments, the costimulatory molecule is CD40, OX40L, 4-1BBL, DEC-205, CD36, CD204, MARCO, DC-SIGN, CLEC9A, CLEC12A, CLEC5A, Dectin 1, Dectin 2, CLEC10A, CD206, CD4, CD32A, CD16A, HVEM, CD32B, PD-L1, or BDCA-2. In certain embodiments, the molecule present on the antigen presenting cell comprises a costimulatory molecule or other molecule that results in activation of the APC upon ligand binding. In certain embodiments, the costimulatory molecule is CD40, OX40L, 4-1BBL, DEC-205, CD36, CD204, MARCO, DC-SIGN, CLEC9A, CLEC12A, CLEC5A, Dectin 1, Dectin 2, CLEC10A, CD206, CD4, CD32A, CD16A, HVEM, CD32B, PD-L1, BDCA-2, TNFR2, or TREM2. The effector antigen binding domain can be a ligand, agonist, or agonistic antibody that results in induction of one or more activation markers of the APC, for example, cytokine release, chemokine release, increased expression of cell surface molecules that engage T cells, including MHC class I, MHC class II or costimulatory molecules. Cytokine release can be measured by a cytokine release assay. Chemokine release can be measured by an ELISA immunoassay. Expression of cell surface molecules can be measured by FACS. In certain embodiments, the effector antigen binding domain is an agonist of CD40, CD80, CD86, OX40L, 4-1BBL, DEC-205, CD36, CD204, MARCO, DC-SIGN, CLEC9A, CLEC12A, CLEC5A, Dectin 1, Dectin 2, CLEC10A, CD206, CD4, CD32A, CD16A, HVEM, CD32B, PD-L1, or BDCA-2. In certain embodiments, the effector antigen binding domain is an agonist of CD40, CD80, CD86, OX40L, 4-1BBL, DEC-205, CD36, CD204, MARCO, DC-SIGN, CLEC9A, CLEC12A, CLEC5A, Dectin 1, Dectin 2, CLEC10A, CD206, CD4, CD32A, CD16A, HVEM, CD32B, PD-L1, BDCA-2, TNFR2, or TREM2. In certain embodiments, the effector antigen binding domain is TNFR2 or TREM. In certain embodiments, the effector antigen binding domain is an agonist of CD40. In certain embodiments, the effector antigen binding domain is derived from an agonist antibody of CD40, and possesses one or more CDR sequences derived from a CD40 agonistic antibody, such as, CP-870,893, APX005M, 3C3, 3G5, Dacetuzmumab and its non-fucosylated form SEA-CD40, or Chi Lob 7/4. The effector antigen binding domain can be a ligand, antagonist, or antagonistic antibody that antagonizes a checkpoint inhibitor and results in induction of one or more activation markers of the APC, for example, cytokine release, chemokine release, increased expression of cell surface molecules that engage T cells, including MHC class I, MHC class II or costimulatory molecules. Cytokine release can be measured by a cytokine release assay. Chemokine release can be measured by an ELISA immunoassay. Expression of cell surface molecules can be measured by FACS. In certain embodiments, the effector antigen binding domain is an antagonist of PD-L1, PD-L2, galectin-9, Indoleamine 2,3-dioxygenase, or CD276. In certain embodiments, the effector antigen binding domain may not be a lipocalin mutein. In certain embodiments, the effector antigen binding domain can be an antibody antigen binding domain.

[0349] Dendritic cells are key antigen presenting cells that participate in anti-cancer immunity. In certain embodiments, the effector antigen binding domain specifically binds to an antigen present on a dendritic cell. In certain embodiments, the antigen present on a dendritic cell comprises CD11b, CD11c, MHC class II molecules, CD40, CD80, CD86, OX40L, DEC-205, 4-1BBL, DEC-205, CD36, CD204, MARCO, DC-SIGN, CLEC9A, CLEC12A, CLEC5A, Dectin 1, Dectin 2, CLEC10A, CD206, CD4, CD32A, CD16A, HVEM, CD32B, PD-L1, or BDCA-2. In certain embodiments, the effector antigen binding domain specifically binds to a protein with at least 80%, 90%, 95%, 97%, 98%, 99%, or 100% homology to CD11b, CD11c, MHC class II molecules, CD40, CD80, CD86, OX40L, DEC-205, 4-1BBL, DEC-205, CD36, CD204, MARCO, DC-SIGN, CLEC9A, CLEC12A, CLEC5A, Dectin 1, Dectin 2, CLEC10A, CD206, CD4, CD32A, CD16A, HVEM, CD32B, PD-L1, or BDCA-2. In certain embodiments, the effector antigen binding domain specifically binds to a protein with at least 80%, 90%, 95%, 97%, 98%, 99%, or 100% homology to CD11b, CD11c, MHC class II molecules, CD40, CD80, CD86, OX40L, DEC-205, 4-1BBL, DEC-205, CD36, CD204, MARCO, DC-SIGN, CLEC9A, CLEC12A, CLEC5A, Dectin 1, Dectin 2, CLEC10A, CD206, CD4, CD32A, CD16A, HVEM, CD32B, PD-L1, BDCA-2, TNFR2, or TREM2. In certain embodiments, the effector antigen binding domain binds to the molecule present on the antigen presenting cell comprising at least 80%, 90%, 95%, 97%, 98%, 99%, or 100% homology to CD40, OX40L, DEC-205, 4-1BBL, CD36, CD204, MARCO, DC-SIGN, CLEC9A, CLEC5A, Dectin 2, CLEC10A, CD206, CD64, CD32A, CD16A, HVEM, CD32B, PD-L1, or BDCA-2. In certain embodiments, the effector antigen binding domain binds to the molecule present on the antigen presenting cell comprising at least 80%, 90%, 95%, 97%, 98%, 99%, or 100% homology to CD40, OX40L, DEC-205, 4-1BBL, CD36, CD204, MARCO, DC-SIGN, CLEC9A, CLEC5A, Dectin 2, CLEC10A, CD206, CD64, CD32A, CD16A, HVEM, CD32B, PD-L1, TNFR2, TREM2, or BDCA-2.

[0350] In some embodiments, the effector antigen binding domain of the recombinant bispecific antibody can have a different binding affinity for a molecule present on an antigen presenting cell in recombinant form compared to the binding affinity for the molecule present on the antigen presenting cell when the molecule is expressed by the antigen presenting cell. As used herein, the recombinant form of a molecule present on an antigen presenting cell (i.e., the recombinant form) can describe the molecule in a form that is independent from the antigen presenting cell, and therefore is not present on a cell or a live cell. In some aspects, a binding affinity of the effector antigen binding domain of the recombinant bispecific antibody to the molecule present on the antigen presenting cell is decreased compared to a binding affinity of the effector antigen binding domain of an antibody that lacks the target antigen binding domain, and this can occur even when the binding affinity of the effector antigen binding domain of the recombinant bispecific antibody to the molecule present on the antigen presenting cell in a recombinant form is similar to the binding affinity of the effector antigen binding domain of an antibody that lacks the target antigen binding domain. Furthermore, a Kd of the binding affinity of the effector antigen binding domain of the recombinant bispecific antibody to the molecule present on the antigen presenting cell can be increased by two times, five times, ten times, fifty times, or one-hundred times compared to the binding affinity of the effector antigen binding domain of an antibody that lacks the target antigen binding domain. In some aspects, the Kd for binding of the effector antigen binding domain to the molecule present on the antigen presenting cell is less than 20 nM, less than 100 nM, or less than 500 nM.

[0351] The effect of the target antigen binding domain and the effector antigen binding domain together can be to cluster antigen presenting cells around cancerous cells and at tumor sites resulting in activation of the antigen presenting effector functions of these cells. In certain embodiments, a recombinant bispecific antibody density of greater than 1000, 2000, 3000, 4000, 5000, 6000, 7000, 8000, 9000, 10,000 or more per cell, resulting from recombinant bispecific antibody binding to the tumor associated antigen, induces signaling in the antigen presenting cell. Signaling and clustering can suitably be measured in vitro. Signaling can be suitably measured using a cell line expressing the tumor associated antigen bound by the target antigen binding domain, and primary antigen presenting cells isolated from a human subject. Signaling can be assessed as cytokine release, chemokine release, or increased expression of cell surface markers. Cytokine release can be measured by a cytokine release assay. Chemokine release can be measured by an ELISA immunoassay. Expression of cell surface molecules can be measured by FACS.

[0352] In certain embodiments, the effector antigen binding domain of the recombinant bispecific antibody disclosed herein is derived from monoclonal antibody CP-870,893. CP-870,893 is a monoclonal antibody that specifically binds to and agonizes CD40. The heavy chain amino acid sequence for CP-870,893 is set forth in SEQ ID NO: 1; the light chain amino acid sequence for CP-870,893 is set forth in SEQ ID NO: 6. In certain embodiments, the effector antigen binding domain comprises a CDR sequence identified from either of SEQ ID NO: 1 or SEQ ID NO: 6 identified using the Kabat, IMGT, or Chothia method. In certain embodiments, the effector antigen binding domain comprises an amino acid sequence with at least 80%, 90%, 95%, 98%, 99%, or 100% identity to SEQ ID NO: 1. In certain embodiments, the effector antigen binding domain comprises an amino acid sequence with at least 80%, 90%, 95%, 98%, 99%, or 100% identity to SEQ ID NO: 6. In certain embodiments, the effector antigen binding domain comprises amino acid sequences with at least 80%, 90%, 95%, 98%, 99%, or 100% identity to SEQ ID NO: 1 and SEQ ID NO: 6.

[0353] The heavy chain variable region amino acid sequence for CP-870,893 is set forth in SEQ ID NO: 2; the light chain variable region amino acid sequence for CP-870,893 is set forth in SEQ ID NO: 7. In certain embodiments, the effector antigen binding domain comprises a CDR sequence identified from either of SEQ ID NOs: 2 or 7 identified using the Kabat, IMGT, or Chothia method. In certain embodiments, the effector antigen binding domain comprises an amino acid sequence with at least 80%, 90%, 95%, 98%, 99%, or 100% identity to SEQ ID NO: 2. In certain embodiments, the effector antigen binding domain comprises an amino acid sequence with at least 80%, 90%, 95%, 98%, 99%, or 100% identity to SEQ ID NO: 7. In certain embodiments, the effector antigen binding domain comprises an amino acid sequence with at least 80%, 90%, 95%, 98%, 99%, or 100% identity to SEQ ID NO: 2 and SEQ ID NO: 7.

[0354] In certain embodiments, the effector antigen binding domain comprises the CDR sequences of monoclonal antibody CP-870,893. The amino acid sequence of the HCDR1 of CP-870,893 is set forth in SEQ ID NO: 3; the amino acid sequence of the HCDR2 of CP-870,893 is set forth in SEQ ID NO: 4; the amino acid sequence of the HCDR3 of CP-870,893 is set forth in SEQ ID NO: 5; the amino acid sequence of the LCDR1 of CP-870,893 is set forth in SEQ ID NO: 8; the amino acid sequence of the LCDR2 of CP-870,893 is set forth in SEQ ID NO: 9; and the amino acid sequence of the LCDR3 of CP-870,893 is set forth in SEQ ID NO: 10. In certain embodiments, the effector antigen binding domain comprises any one of SEQ ID NO: 3-SEQ ID NO: 5 and SEQ ID NO: 8-SEQ ID NO: 10. In certain embodiments, the effector antigen binding domain comprises all of SEQ ID NO: 3-SEQ ID NO: 5 and SEQ ID NO: 8-SEQ ID NO: 10. In certain embodiments, the effector antigen binding domain comprises any one of SEQ ID NO: 3-SEQ ID NO: 5. In certain embodiments, the effector antigen binding domain comprises any one of SEQ ID NO: 8-SEQ ID NO: 10. In certain embodiments, the effector antigen binding domain comprises all of SEQ IDO NO: 3-SEQ ID NO: 5. In certain embodiments, the effector antigen binding domain comprises all of SEQ ID NO: 8-SEQ ID NO: 10. The CDR sequences above may be incorporated into the effector antigen binding domain by any method of recombinant DNA technology. The incorporated CDRs can have any amount of amino acid sequence identity to any one of SEQ ID NO: 3-SEQ ID NO: 5 and SEQ ID NO: 8-SEQ ID NO: 10 that still retains the specific binding of CP-870,893, for example, 80%, 90%, 95%, 98%, 99%, or 100% identity.

[0355] In certain embodiments, the effector antigen binding domain comprises a CD40 scFv. The CD40 scFv can be either attached (fused via a peptide bond between amino acids) or coupled (via a linker) to the C-terminus of the Fc comprising domain polypeptide. In certain embodiments, the CD40 scFv comprises an amino acid sequence set forth in SEQ ID NO: 1312. In certain embodiments, the effector antigen binding domain attached to the Fc comprising domain comprises an amino acid sequence at least 80%, 90%, 95%, 98%, 99%, or 100% identical to that set forth in SEQ ID NO: 1312.

[0356] In certain embodiments, the recombinant bispecific antibody comprises an effector antigen binding with at least 80%, 90%, 95%, 98%, 99%, or 100% sequence identity to 6, 7, 8, 9, 10, 11, 12 or more contiguous amino acids between amino acid 20 and amino acid 110 of SEQ ID NO: 12 and at least 80%, 90%, 95%, 98%, 99%, or 100% sequence identity to 6, 7, 8, 9, 10, 11, 12 or more contiguous amino acids between amino acid 20 and amino acid 105 of SEQ ID NO: 17.

[0357] In some embodiments, the effector antigen binding domain comprises an immunoglobulin heavy chain variable region or antigen binding fragment thereof and an immunoglobulin light chain variable region or antigen binding fragment thereof. In some embodiments, the effector antigen binding domain comprises a single chain variable region fragment (scFv).

[0358] In some embodiments, the scFv comprises at least 80% sequence identity to an amino acid sequence of SEQ ID NO: 1312.

[0359] In some embodiments, the antigen presenting cell is a dendritic cell. In some embodiments, the antigen on the antigen presenting cell is a costimulatory molecule.

[0360] In some embodiments, the antigen on the antigen presenting cell is selected from the group consisting of CD40, OX40L, DEC-205, 4-1BBL, CD36, CD204, MARCO, DC-SIGN, CLEC9A, CLEC5A, Dectin 2, CLEC10A, CD206, CD64, CD32A, CD1A, HVEM, CD32B, PD-L1, or BDCA-2. In some embodiments, the effector antigen binding domain is a CD40 agonist.

[0361] In some embodiments, the effector antigen binding domain comprises the following CDRs: a) HCDR1 comprising an amino acid sequence of SEQ ID NO: 3; b) HCDR2 comprising an amino acid sequence of SEQ ID NO: 4; c) HCDR3 comprising an amino acid sequence of SEQ ID NO: 5; d) LCDR1 comprising an amino acid sequence of SEQ ID NO: 8; e) LCDR2 comprising an amino acid sequence of SEQ ID NO: 9; and f) LCDR3 comprising an amino acid sequence of SEQ ID NO: 10.

[0362] In some embodiments, the effector antigen binding domain comprises: a) a V_{H} sequence having at least 80% sequence identity to an amino acid sequence of SEQ ID NO: 2; and b) a VL sequence having at least 80% sequence identity to an amino acid sequence of SEQ ID NO: 7. In some embodiments, the effector antigen binding domain comprises: a) a heavy chain sequence having at least 80% sequence identity to an amino acid sequence of SEQ ID NO: 1; and b) a light chain having at least 80% sequence identity to an amino acid sequence of SEQ ID NO: 6.

[0363] In some embodiments, the antigen on the antigen presenting cell is TREM2 or TNFR2.

[0364] In some embodiments, the effector antigen binding domain has an increased binding affinity to the antigen on the antigen presenting cell as compared to the binding affinity of the effector antigen binding domain of an antibody that lacks the target antigen binding domain.

[0365] In some embodiments, a K_{d} of the binding affinity of the effector antigen binding domain of the recombinant bispecific antibody to the antigen on the antigen presenting cell is increased by two times, five times, ten times, fifty times, or one-hundred times compared to the binding affinity of the effector antigen binding domain of an antibody that lacks the target antigen binding domain.

[0366] In some embodiments, a K_{d} for binding of the effector antigen binding domain to the antigen on the antigen presenting cell is less than 20 nM, less than 100 nM, or less than 500 nM.

### Nucleotides Encoding Antibodies

[0367] In certain embodiments, antibodies are encoded by polynucleotides for expression and purification from a cell based system. Suitable polynucleotides include vectors such as DNA plasmids, viral vectors, and RNA molecules. Suitable viral vectors include retroviral, lentiviral, adenoviral, or baculoviral vectors.

[0368] Antibodies can be produced by a suitable method including by synthesis, in a cell based system, or a combination thereof. A suitable cell line for the production of the recombinant antibodies includes the CHO (Chinese hamster ovary) cell line or variants/derivatives thereof. Other suitable cell lines include AGE1.HN, NS0, Sp2/0, BHK21, HEK-293, HT-1080, PER.C6, HKB-11, CAP, and HuH-7 cell lines or variants/derivatives thereof. In a certain embodiment, the cell(s) utilized for production is transiently transfected or infected with the vector(s). In a certain embodiment, the production cell(s) is stably transfected with the vector(s), and constitutes a master cell bank for the production of antibodies. A master cell bank allows freezing and preservation of an antibody producing cell line. This allows for more efficient and consistent production of antibodies. Cells that are transfected or infected with vector(s) encoding an antibody are then cultured in a growth media for at least 1, 3, 5, 7, 9, 11, 14 days or more and the growth media is harvested for purification of the antibody. In certain embodiments, the growth media lacks serum of human or animal origin.

[0369] In certain embodiments, antibodies isolated or purified after secretion from a cell based system. Purification includes at least one step comprising centrifugation, precipitation, filtration, dialysis. The Fc region of the antibodies may retain the ability to interact with bacterial super antigens such as Protein A or Protein G. In certain embodiments, purification comprises a step utilizing Protein A, Protein G, or a combination thereof, to specifically separate recombinant antibodies from other secreted proteins and serum. In certain embodiments, column chromatography is utilized.

### Immune-Stimulatory Compounds

[0370] The antibody constructs and recombinant bispecific antibodies described herein can further be attached to an immune-stimulatory compound to form a conjugate. The immune-stimulatory compound can provide a direct, indirect or adjuvant effect. In certain embodiments, the immune-stimulatory compound can be coupled to the antibody construct, such as to the Fc domain of the antibody construct. An immune-stimulatory compound can be any compound that directly or indirectly stimulates an anti-tumor immune response after administration. For example, an immune-stimulatory compound can directly stimulate an anti-tumor immune response by causing the release of cytokines by its target cell, which results in the activation of immune cells. As another example, an immune-stimulatory compound can indirectly stimulate an immune response by suppressing IL-10 production and secretion by the target cell and/or by supressing the activity of regulatory T cells, resulting in an increased anti-tumor response by immune cells. The stimulation of an immune response by an immune-stimulatory compound can be measured by the upregulation of proinflammatory cytokines and/or increased activation of immune cells. This effect can be measured in vitro by co-culturing immune cells with cells targeted by the immune-stimulatory conjugate and measuring cytokine release, chemokine release, proliferation of immune cells, upregulation of immune cell activation markers, and/or ADCC. ADCC can be measured by an ADCC assay, which can determine the percentage of remaining target cells, such as tumor cells, in the co-culture after administration of the immune-stimulatory conjugate with the target cells and immune cells.

[0371] In certain embodiments, an immune-stimulatory compound can target a pattern recognition receptor (PRR). PRRs can recognize pathogen-associated molecular patterns (PAMPs) and damage-associated molecular patterns (DAMPs). A PRR can be membrane bound. A PRR can be cytosolic. A PRR can be a toll-like receptor (TLR). A PRR can be RIG-I-like receptor. A PRR can be a receptor kinase. A PRR can be a C-type lectin receptor. A PRR can be a NOD-like receptor. A PRR can be TLR1, TLR2, TLR3, TLR4, TLR5, TLR6, TLR7, TLR8, TLR9, TLR10, TLR11, TLR12 or TLR13. A PRR can be TLR1, TLR2, TLR3, TLR4, TLR5, TLR6, TLR7, TLR8, TLR9, and TLR10.

[0372] In certain embodiments, the immune-stimulatory compound can be a Damage-Associated Pattern Molecule (DAMP) or a Pathogen-Associated Molecular Pattern Molecule (PAMP). Immune-stimulatory molecular motifs, such as PAMPs, can be recognized by receptors of the innate immune system, such as Toll-like receptors (TLRs), Nod-like receptors, C-type lectins, and RIG-I-like receptors. These receptors can be transmembrane and intra-endosomal proteins which can prime activation of the immune system in response to infectious agents such as pathogens. Similar to other protein families, TLRs can have many isoforms, including TLR4, TLR7 and TLR8. TLR agonists can range from simple molecules to complex macromolecules. Likewise, the sizes of TLR agonists can range from small to large. TLR agonists can be synthetic or biosynthetic agonists. TLR agonists can also be PAMPs. Additional immune-stimulatory compounds, such as cytosolic DNA and unique bacterial nucleic acids called cyclic dinucleotides, can be recognized by Interferon Regulatory Factor (IRF) or stimulator of interferon genes (STING), which can act a cytosolic DNA sensor. Compounds recognized by Interferon Regulatory Factor (IRF) can play a role in immunoregulation by TLRs and other pattern recognition receptors.

[0373] Imiquimod, a synthetic TLR7 agonist, is currently approved for human therapeutic applications. Contained in a cream and marketed under the brand name Aldara™, imiquimod serves as a topical treatment for a variety of indications with immune components, such as, actinic keratosis, genital warts, and basal cell carcinomas. In addition, imiquimod is indicated as a candidate adjuvant for enhancing adaptive immune responses when applied topically at an immunization site.

[0374] Another type of immune stimulatory molecular motif, Damage-Associated Molecular Mattern molecules (DAMPs), can initiate and maintain an immune response occurring as part of the non-infectious inflammatory response. DAMPs can be specially localized proteins that, when detected by the immune system in a location other than where DAMPs should be located, activate the immune system. Often, DAMPs can be nuclear or cytosolic proteins and upon release from the nucleus or cytosol, DAMP proteins can become denatured through oxidation. Examples of DAMP proteins can include chromatin-associated protein high-mobility group box 1 (HMGB 1), S100 molecules of the calcium modulated family of proteins and also glycans, such as hyaluronan fragments, and glycan conjugates. DAMPs can also be nucleic acids, such as DNA, when released from tumor cells following apoptosis or necrosis. Examples of additional DAMP nucleic acids can include RNA and purine metabolites, such as ATP, adenosine and uric acid, present outside of the nucleus or mitochondria.

[0375] In certain embodiments, an immune-stimulatory compound can be a Toll-like receptor agonist, a STING agonist, or a RIG-I agonist.

[0376] In certain embodiments, an immune-stimulatory compound can be a TLR agonist. Additionally, the immune response elicited by TLR agonists can further be enhanced when co-administered with a CD40-agonist antibody. For example, co-administration of a TLR agonist such as poly IC:LC with a CD40-agonist antibody can synergize to stimulate a greater CD8+ T cell response than either agonist alone.

[0377] In certain embodiments, the immune-stimulatory compound can be S-27609, CL307, UC-IV150, imiquimod, gardiquimod, resiquimod, motolimod, VTS-1463GS-9620, GSK2245035, TMX-101, TMX-201, TMX-202, isatoribine, AZD8848, MEDI9197, 3M-051, 3M-852, 3M-052, 3M-854A, S-34240, KU34B, SB9200, SB11285, 8-substituted imidazo[1,5-a]pyridine, or CL663.

[0378] In certain embodiments, the immune-stimulatory compound can be a TLR4 agonist, such as AZ126 (N-(2-(cyclopentylamino)-2-oxo-1-(pyridin-4-yl)ethyl)-N-(4-methoxyphenyl)-3-methyl-5-phenyl-1H-pyrrole-2-carboxamide) or AZ368 ((E)-3-(4-(2-(cyclopentylamino)-1-(N-(4-isopropylphenyl)-1,5-diphenyl-1H-pyrazole-3-carboxamido)-2-oxoethyl)phenyl)acrylic acid).

[0379] In some embodiments, the immune-stimulatory compound can be a TLR7 agonist, such as TLR7 agonist R848.

[0380] The immune-stimulatory compound can comprise an inhibitor of TGFB, Beta-Catenin, PI3K-beta, STAT3, IL-10, IDO or TDO. The immune-stimulatory compound can be an inhibitor of the beta-catenin pathway, such as an inhibitor of TNIK or Tankyrase. In certain embodiments, the immune-stimulatory compound be a kinase inhibitor. In certain embodiments, the kinase inhibitor can be an inhibitor of CDK4/6, such as, for example, abemaciclib or palbociclib.

[0381] The immune-stimulatory compound can be LY2109761, GSK263771, iCRT3, iCRT5, iCRT14, LY2090314, CGX-1321, PRI-724, BC21, ZINCO2092166, LGK974, IWP2, LY3022859, LY364947, SB431542, AZD8186, SD-208, indoximod (NLG8189), F001287, GDC-0919, epacadostat (INCB024360), RG70099, 1-methyl-L-tryptophan, methylthiohydantoin tryptophan, brassinin, annulin B, exiguamine A, PIM, LM10, 8-substituted 2-amino-3H-benzo[b]azepine-4-carboxamide, or INCB023843.

[0382] In certain embodiments, the immune-stimulatory compound can be coupled to the antibody construct via a linker. In certain embodiments, the immune-stimulatory compound is coupled to the antibody construct using a linker wherein the immune-stimulatory compound comprises a Toll-like receptor agonist, STING agonist, or RIG-I agonist. In certain embodiments, the Toll-like receptor agonist comprises a CpG oligonucleotide, Poly G10, Poly G3, Poly I:C, Lipopolysaccharide, zymosan, flagellin, Pam3CSK4, PamCysPamSK4, dsRNA, a diacylated lipopeptide, a triacylated lipoprotein, lipoteichoic acid, or a peptidoglycan. In certain embodiments, the STING agonist comprises a cyclic dinucleotide. In certain embodiments, the RIG-1 agonist comprises a 5′ppp-dsRNA.

[0383] A PRR agonist can be pathogen-associated molecular pattern (PAMP) molecule. A PAMP molecule can be a toll-like receptor agonist. A PRR agonist can be a toll-like receptor agonist. A toll-like receptor agonist can be any molecule that acts as an agonist to at least one toll-like receptor. A toll-like receptor agonist can be bacterial lipoprotein. A toll-like receptor agonist can be bacterial peptidoglycans. A toll-like receptor agonist can be double stranded RNA. A toll-like receptor agonist can be lipopolysaccharides. A toll-like receptor agonist can be bacterial flagella. A toll-like receptor agonist can be single stranded RNA. A toll-like receptor can be CpG DNA. A toll-like receptor agonist can be imiquimod. A toll-like receptor agonist can be CL307. A toll-like receptor agonist can be S-27609. A toll-like receptor agonist can be resiquimod. A toll-like receptor agonist can be UC-IV150. A toll-like receptor agonist can be gardiquimod. A toll-like receptor agonist can be motolimod. A toll-like receptor agonist can be VTX-1463. A toll-like receptor agonist can be GS-9620. A toll-like receptor agonist can be GSK2245035. A toll-like receptor agonist can be TMX-101. A toll-like receptor agonist can be TMX-201. A toll-like receptor agonist can be TMX-202. A toll-like receptor agonist can be isatoribine. A toll-like receptor agonist can be AZD8848. A toll-like receptor agonist can be MEDI9197. A toll-like receptor agonist can be 3M-051. A toll-like receptor agonist can be 3M-852. A toll-like receptor agonist can be 3M-052. A toll-like receptor agonist can be 3M-854A. A toll-like receptor agonist can be S-34240. A toll-like receptor agonist can be CL663. A RIG-I agonist can be KIN1148. A RIG-I agonist can be SB-9200. A RIG-I agonist can be KIN700, KIN600, KIN500, KIN100, KIN101, KIN400, or KIN2000. A toll-like receptor agonist can be KU34B.

[0384] A PRR agonist can be a damage-associated molecular pattern (DAMP) molecule. A DAMP molecule can be an intracellular protein. A DAMP molecule can be a heat-shock protein. A DAMP molecule can be an HMGB 1 protein. A DAMP molecule can be a protein derived from the extracellular matrix that is generated after tissue injury. A DAMP molecule can be a hyaluronan fragment. A DAMP molecule can be DNA. A DAMP molecule can be RNA. A DAMP molecule can be an S100 molecule. A DAMP molecule can be nucleotides. A DAMP molecule can be an ATP. A DAMP molecule can be nucleosides. A DAMP molecule can be an adenosine. A DAMP molecule can be uric acid.

[0385] Additionally, an immune-stimulatory compound can target stimulator of interferon genes (STING). STING can act as a cytosolic DNA sensor wherein cytosolic DNA and unique bacterial nucleic acids called cyclic dinucleotides are recognized by STING, and therefore STING agonists. Interferon Regulatory Factor (IRF) agonist can be KIN-100. Non-limiting examples of STING agonists include:

[chemical structure]

wherein in some embodiments, X₁═X₂═O; X₃=G; X₄=G; X₅═CO(CH₂)₁₂CH₃; X₆=2 TEAH; in some embodiments, X₁═X₂═S [Rₚ,Rₚ]; X₃=G; X₄=A; X₅═H; X₆=2 TEAH; in some embodiments, X₁═X₂═S [Rₚ,Rₚ]; X₃=A; X₄=A; X₅═H; X₆=2 Na; in some embodiments, X₁═X₂═S [Rₚ,Rₚ]; X₃=A; X₄=A; X₅═H; X₆=2 NH₄; and in some embodiments, X₁═X₂═O; X₃=G; X₄=A; X₅═H; X₆=2 TEAH,

[chemical structure]

[chemical structure]

wherein R₁═R₂═H; R₁=propargyl, R₂═H; R₁═H, R₂=propargyl; R₁=allyl, R₂═H; R₁═H, R₂=allyl; R₁=methyl, R₂═H; R₁═H, R₂=methyl; R₁=ethyl, R₂═H; R₁═H, R₂=ethyl; R₁=propyl, R₂═H; R₁═H, R₂=propyl; R₁=benzyl, R₂═H; R₁═H, R₂=benzyl; R₁=myristoyl, R₂═H; R₁═H, R₂=myristoyl; R₁═R₂=heptanoyl; R₁═R₂=hexanoyl; or R₁═R₂=pentanoyl,

[chemical structure]

[chemical structure]

wherein R₁═R₂═H; R₁=propargyl, R₂═H; R₁═H, R₂=propargyl; R₁=allyl, R₂═H; R₁═H, R₂=allyl; R₁=methyl, R₂═H; R₁═H, R₂=methyl; R₁=ethyl, R₂═H; R₁═H, R₂=ethyl; R₁=propyl, R₂═H; R₁═H, R₂=propyl; R₁=benzyl, R₂═H; R₁═H, R₂=benzyl; R₁=myristoyl, R₂═H; R₁═H, R₂=myristoyl; R₁═R₂=heptanoyl; R₁═R₂=hexanoyl; or R₁═R₂=pentanoyl,

[chemical structure]

[chemical structure]

wherein R₁═R₂═H; R₁=propargyl; R₂═H; R₁═H, R₂=propargyl; R₁=allyl, R₂═H; R₁═H, R₁=methyl, R₂═H; R₁═H, R₂=methyl; R₁=ethyl, R₂═H; R₁═H, R₂=ethyl; R₁=propyl, R₂═H; R₁═H, R₂=propyl; R₁=benzyl, R₂═H; R₁═H, R₂=benzyl; R₁=myristoyl, R₂═H; R₁═H, R₂=myristoyl; R₁═R₂=heptanoyl; R₁═R₂=hexanoyl; or R₁═R₂=pentanoyl,

[chemical structure]

wherein each X is independently O or S, and R3 and R4 are each independently H or an optionally substituted straight chain alkyl of from 1 to 18 carbons and from 0 to 3 heteroatoms, an optionally substituted alkenyl of from 1-9 carbons, an optionally substituted alkynyl of from 1-9 carbons, or an optionally substituted aryl, wherein substitution(s), when present, may be independently selected from the group consisting of C₁₋₆ alkyl straight or branched chain, benzyl, halogen, trihalomethyl, C₁₋₆ alkoxy, —NO₂, —NH₂, OH, —O, —COOR′— where R′ is H or lower alkyl, —CH₂OH, and —CONH₂, wherein R3 and R4 are not both H,

[chemical structure]

wherein X₁═X₂═O; X₁═X₂═S; or X₁═O and X₂═S,

[chemical structure]

[chemical structure]

[chemical structure]

[0386] An immune-stimulatory compound can be a PRR agonist. An immune-stimulatory compound can be a PAMP. An immune-stimulatory compound can be a DAMP. An immune-stimulatory compound can be a TLR agonist. An immune-stimulatory compound can be a STING agonist. An immune-stimulatory compound can be a cyclic dinucleotide.

[0387] The specificity of the antigen-binding domain to an antigen of a conjugate disclosed herein can be influenced by the presence of an immune-stimulatory compound. The antigen-binding domain of the conjugate can bind to an antigen with at least about 10%, about 20%, about 30%, about 40%, about 50%, about 60%, about 70%, about 80%, about 85%, about 90%, about 95%, or about 100% of a specificity of the antigen-binding domain to the antigen in the absence of the immune-stimulatory compound.

[0388] The specificity of the Fc domain to an Fc receptor of a conjugate disclosed herein can be influenced by the presence of an immune-stimulatory compound. The Fc domain of the conjugate can bind to an Fc receptor with at least about 10%, about 20%, about 30%, about 40%, about 50%, about 60%, about 70%, about 80%, about 85%, about 90%, about 95%, or about 100% of a specificity of the Fc domain to the Fc receptor in the absence of the immune-stimulatory compound.

[0389] The affinity of the antigen-binding domain to an antigen of a conjugate disclosed herein can be influenced by the presence of an immune-stimulatory compound. The antigen-binding domain of the conjugate can bind to an antigen with at least about 1%, about 5%, about 10%, about 20%, about 30%, about 40%, about 50%, about 60%, about 70%, about 80%, about 85%, about 90%, about 95%, or about 100% of an affinity of the antigen-binding domain to the antigen in the absence of the immune-stimulatory compound.

[0390] The affinity of the Fc domain to an Fc receptor of a conjugate disclosed herein can be influenced by the presence of an immune-stimulatory compound. The Fc domain of the conjugate can bind to an Fc receptor with at least about 1%, about 5%, about 10%, about 20%, about 30%, about 40%, about 50%, about 60%, about 70%, about 80%, about 85%, about 90%, about 95%, or about 100% of an affinity of the Fc domain to the Fc receptor in the absence of the immune-stimulatory compound.

[0391] The K_{d} for binding of an antigen-binding domain to an antigen in the presence of an immune-stimulatory compound can be about 2 times, about 3 times, about 4 times, about 5 times, about 6 times, about 7 times, about 8 times, about 9 times, about 10 times, about 15 times, about 20 times, about 25 times, about 30 times, about 35 times, about 40 times, about 45 times, about 50 times, about 60 times, about 70 times, about 80 times, about 90 times, about 100 times, about 110 times, or about 120 times greater than the K_{d} for binding of the antigen binding domain to the antigen in the absence of the immune-stimulatory compound.

[0392] The K_{d} for binding of an Fc domain to a Fc receptor in the presence of an immune-stimulatory compound can be about 2 times, about 3 times, about 4 times, about 5 times, about 6 times, about 7 times, about 8 times, about 9 times, about 10 times, about 15 times, about 20 times, about 25 times, about 30 times, about 35 times, about 40 times, about 45 times, about 50 times, about 60 times, about 70 times, about 80 times, about 90 times, about 100 times, about 110 times, or about 120 times greater than the K_{d} for binding of the Fc domain to the Fc receptor in the absence of the immune-stimulator compound.

[0393] Affinity can be the strength of the sum total of noncovalent interactions between a single binding site of a molecule, for example, an antibody, and the binding partner of the molecule, for example, an antigen. The affinity can also measure the strength of an interaction between an Fc portion of an antibody or antibody construct and the Fc receptor. Unless indicated otherwise, as used herein, “binding affinity” can refer to intrinsic binding affinity which reflects a 1:1 interaction between members of a binding pair (e.g., antibody and antigen or Fc domain and Fc receptor). The affinity of a molecule X for its partner Y can generally be represented by the dissociation constant (K_{d}). Affinity can be measured by common methods known in the art, including those described herein. Specific illustrative and exemplary embodiments for measuring binding affinity are described in the following.

[0394] In some embodiments, an antibody or antibody construct provided herein can have a dissociation constant (K_{d}) of about 1 μM, about 100 nM, about 10 nM, about 5 nM, about 2 nM, about 1 nM, about 0.5 nM, about 0.1 nM, about 0.05 nM, about 0.01 nM, or about 0.001 nM or less (e.g., 10⁻⁸ M or less, e.g., from 10⁻⁸ M to 10⁻¹³ M, e.g., from 10⁻⁹ M to 10⁻¹³ M). An affinity matured antibody can be an antibody with one or more alterations in one or more complementarity determining regions (CDRs), compared to a parent antibody, which may not possess such alterations, such alterations resulting in an improvement in the affinity of the antibody for antigen. These antibodies can bind to their antigen with a K_{d} of about 5×10⁻⁹ M, about 2×10⁻⁹ M, about 1×10⁻⁹ M, about 5×10⁻¹ M, about 2×10⁻⁹ M, about 1×10⁻¹⁰ M, about 5×10−11 M, about 1×10¹¹ M, about 5×10⁻¹² M, about 1×10⁻¹² M, or less. In some embodiments, the conjugate can have an increased affinity of at least 1.5-fold, 2-fold, 2.5-fold, 3-fold, 4-fold, 5-fold, 10-fold, 20-fold, or greater as compared to a conjugate without alterations in one or more complementarity determining regions.

[0395] K_{d} can be measured by any suitable assay. For example, K_{d} can be measured by a radiolabeled antigen binding assay (RIA). For example, K_{d} can be measured using surface plasmon resonance assays (e.g., using a BIACORE®-2000 or a BIACORE®-3000).

[0396] Agonism can be described as the binding of a chemical to a receptor to induce a biological response. A chemical can be, for example, a small molecule, a compound, or a protein. An agonist causes a response, an antagonist can block the action of an agonist, and an inverse agonist can cause a response that is opposite to that of the agonist. A receptor can be activated by either endogenous or exogenous agonists.

[0397] The molar ratio of a conjugate refers to the average number of immune-stimulatory compounds conjugated to the antibody construct in a preparation of a conjugate. The molar ratio can be determined, for example, by Liquid Chromatography/Mass Spectrometry (LC/MS), in which the number of immune-stimulatory compounds conjugated to the antibody construct can be directly determined. Additionally, as non-limiting examples, the molar ratio can be determined based on hydrophobic interaction chromatography (HIC) peak area, by liquid chromatography coupled to electrospray ionization mass spectrometry (LC-ESI-MS), by UV/Vis spectroscopy, by reversed-phase-HPLC (RP-HPLC), or by matrix-assisted laser desorption/ionization time of flight mass spectrometry (MALDI-TOF-MS).

[0398] In some embodiments, the molar ratio of immune-stimulatory compound to antibody construct can be less than 8. In other embodiments, the molar ratio of immune-stimulatory compound to antibody construct can be 8, 7, 6, 5, 4, 3, 2, or 1.

[0399] In some aspects, the present disclosure provides an immune-stimulatory compound represented by the structure of Formula (I):

[chemical structure]

or a pharmaceutically acceptable salt thereof, wherein:
X¹ is selected from —OR² and —SR²;
X² is selected from —OR³ and —SR³;
B¹ and B² are independently selected from optionally substituted nitrogenous bases;
Y is selected from —OR⁴, —NR⁴R⁴, and halogen;

[0400] R¹, R², R³ and R⁴ are independently selected at each occurrence from hydrogen, —C(═O)R¹⁰⁰, —C(═O)OR¹⁰⁰ and —C(═O)NR¹⁰⁰; C₁₋₁₀ alkyl, C₂₋₁₀ alkenyl, C₂₋₁₀ alkynyl, each of which is independently optionally substituted at each occurrence with one or more substituents selected from halogen, —OR¹⁰⁰, —SR¹⁰⁰, —N(R¹⁰⁰)₂, —S(O)R¹⁰⁰, —S(O)₂R¹⁰⁰, —C(O)R¹⁰⁰, —C(O)OR¹⁰⁰, —OC(O)R¹⁰⁰, —NO₂, ═O, ═S, ═N(R¹⁰⁰), —P(O)(OR¹⁰⁰)₂, —OP(O)(OR¹⁰⁰)₂, —CN, C₃₋₁₀ carbocycle and 3- to 10-membered heterocycle; and C₃₋₁₀ carbocycle and 3- to 10-membered heterocycle, wherein each C₃₋₁₀ carbocycle and 3- to 10-membered heterocycle in R¹, R², R³ and R⁴ is independently optionally substituted with one or more substituents selected from halogen, —OR¹⁰⁰, —SR¹⁰⁰, —N(R¹⁰⁰)₂, —S(O)R¹⁰⁰, —S(O)₂R¹⁰⁰, —C(O)R¹⁰⁰, —C(O)OR¹⁰⁰, —OC(O)R¹⁰⁰, —NO₂, ═O, ═S, ═N(R¹⁰⁰), —P(O)(OR¹⁰⁰)₂, —OP(O)(OR¹⁰⁰)₂, —CN, C₁₋₆ alkyl, C₂₋₆ alkenyl, and C₂₋₆ alkynyl; and R¹⁰⁰ at each occurrence is independently selected from hydrogen; and C₁₋₁₀ alkyl, C₂₋₁₀ alkenyl, C₂₋₁₀ alkynyl, C₃₋₁₀ carbocycle, and 3- to 10-membered heterocycle each of which is independently optionally substituted at each occurrence with one or more substituents selected from halogen, —CN, —NO₂, ═O, ═S, and haloalkyl.

[0401] In some embodiments, the compound of Formula (I) is represented by Formula (IA):

[chemical structure]

or pharmaceutically acceptable salts thereof.

[0402] In an alternative embodiment, the compound of Formula (I) is represented by Formula (IB):

[chemical structure]

or a pharmaceutically acceptable salt thereof.

[0403] In various embodiments, B¹ and B² are independently selected from optionally substituted purines. In certain embodiments, B¹ and B² are independently selected from:

[chemical structure]

In certain embodiments, B¹ and B² are independently selected from optionally substituted pyrimidines.

[0404] In some embodiments, optionally substituted purines may include optionally substituted adenine, optionally substituted guanine, optionally substituted xanthine, optionally substituted hypoxanthine, optionally substituted theobromine, optionally substituted caffeine, optionally substituted uric acid, and optionally substituted isoguanine. In certain embodiments, B¹ and B² are independently selected from:

[chemical structure]

optionally substituted by one or more additional substituents.

[0405] In certain embodiments, B¹ and B² are independently selected from:

[chemical structure]

wherein the point of connectivity of B to the remainder of the compound is represented by

[chemical structure]

[0406] In a preferred embodiment, B¹ and B² are independently selected from optionally substituted adenine and optionally substituted guanine. In certain embodiments, B¹ and B² are independently selected from

[chemical structure]

optionally further substituted by one or more substituents. In certain embodiments, B¹ and B² are independently selected from:

[chemical structure]

[0407] In some embodiments, B¹ and B² are independently optionally substituted with one or more substituents, wherein the optional substituents on B¹ and B² are independently selected at each occurrence from halogen, ═O, ═S, —OR¹⁰⁰, —SR¹⁰⁰, —N(R¹⁰⁰)₂, —S(O)R¹⁰⁰, —S(O)₂R¹⁰⁰, —C(O)R¹⁰⁰, —C(O)OR¹⁰⁰, —OC(O)R¹⁰⁰, —NO₂, —P(O)(OR¹⁰⁰)₂, —OP(O)(OR¹⁰⁰)₂ and —CN; C₁₋₁₀ alkyl, C₂₋₁₀ alkenyl, C₂₋₁₀ alkynyl, each of which is independently optionally substituted at each occurrence with one or more substituents selected from halogen, —OR¹⁰⁰, —SR¹⁰⁰, —N(R¹⁰⁰)₂, —S(O)R¹⁰⁰, —S(O)₂R¹⁰⁰, —C(O)R¹⁰⁰, —C(O)OR¹⁰⁰, —OC(O)R¹⁰⁰, —NO₂, ═O, ═S, ═N(R¹⁰⁰), —P(O)(OR¹⁰⁰)₂, —OP(O)(OR¹⁰⁰)₂, —CN, C₃₋₁₀ carbocycle and 3- to 10-membered heterocycle; and C₃₋₁₀ carbocycle and 3- to 10-membered heterocycle, wherein each C₃₋₁₀ carbocycle and 3- to 10-membered heterocycle is independently optionally substituted with one or more substituents selected from halogen, —OR¹⁰⁰, —SR¹⁰⁰, —N(R¹⁰⁰)₂, —S(O)R¹⁰⁰, —S(O)₂R¹⁰⁰, — —C(O)R¹⁰⁰, —C(O)OR¹⁰⁰, —OC(O)R¹⁰⁰, —NO₂, ═O, ═S, ═N(R¹⁰⁰), —P(O)(OR¹⁰⁰)₂, —OP(O)(OR¹⁰⁰)₂, —CN, C₁₋₆ alkyl, C₂₋₆ alkenyl, and C₂₋₆ alkynyl.

[0408] In certain embodiments, B¹ and B² are independently optionally substituted with one or more substituents, wherein the optional substituents on B¹ and B² are independently selected at each occurrence from halogen, ═O, ═S, —OR¹⁰⁰, —SR¹⁰⁰, —N(R¹⁰⁰)₂, —S(O)R¹⁰⁰, —S(O)₂R¹⁰⁰, —C(O)R¹⁰⁰, —C(O)OR¹⁰⁰, —OC(O)R¹⁰⁰, —NO₂, —P(O)(OR¹⁰⁰)₂, —OP(O)(OR¹⁰⁰)₂, —CN and C₁₋₁₀ alkyl.

[0409] In some embodiments, B¹ is an optionally substituted guanine. In certain embodiments, B¹ is

[chemical structure]

In certain embodiments, B¹ is

[chemical structure]

wherein the point of connectivity of B1 to the remainder of the compound is represented by

[chemical structure]

In some embodiments, B¹ is an optionally substituted adenine. In certain embodiments, B¹ is

[chemical structure]

In certain embodiments, B¹ is

[chemical structure]

wherein the point of connectivity of B¹ to the remainder of the compound is represented by

[chemical structure]

[0410] In some embodiments, B² is an optionally substituted guanine. In certain, embodiments, B² is

[chemical structure]

In certain embodiments, B² is

[chemical structure]

wherein the point of connectivity on B² is represented by

[chemical structure]

In some embodiments, B² is an optionally substituted adenine. In certain embodiments, B² is

[chemical structure]

In certain embodiments, B² is

[chemical structure]

wherein the point of connectivity on B² is represented by

[chemical structure]

[0411] In some embodiments, B¹ is an optionally substituted guanine and B² is an optionally substituted guanine. In some embodiments, B¹ is an optionally substituted adenine and B² is an optionally substituted guanine.

[0412] In various embodiments, X¹ is selected from —OH and —SH. For example, X¹ may be —OH. In various embodiments, X² is selected from —OH and —SH. For example, X² may be —OH. In some embodiments, X¹ is —OH and X² is —OH. In some embodiments, X¹ is —SH and X² is —SH.

[0413] In various embodiments, Y is selected from —OH, —O—C₁₋₁₀ alkyl, —NH(C₁₋₁₀ alkyl), and —NH₂. For example, Y may be —OH.

[0414] In various embodiments, R¹⁰⁰ is independently selected at each occurrence from hydrogen and C₁₋₁₀ alkyl optionally substituted at each occurrence with one or more substituents selected from halogen, —CN, —NO₂, ═O, and ═S.

[0415] In various embodiments, the compound of Formula (I) is represented by Formula (IC):

[chemical structure]

or a pharmaceutically acceptable salt thereof. In some embodiments, the compound of Formula (IC) is represented by Formula (ID):

[chemical structure]

or a pharmaceutically acceptable salt thereof.

[0416] In various embodiments, the compound is a pharmaceutically acceptable salt. In some embodiments, the compound or salt is a modulator of a stimulator of interferon genes (STING). The compound or salt may agonize a stimulator of interferon genes (STING). In certain embodiments, the compound or salt may cause STING to coordinate multiple immune responses to infection, including the induction of interferons and STAT6-dependent response and selective autophagy response. In certain embodiments, the compound or salt may cause STING to mediate type I interferon production.

[0417] In some aspects, the present disclosure provides a compound represented by the structure of Formula (II):

[chemical structure]

or a pharmaceutically acceptable salt thereof, wherein:

[0418] X¹ is selected from —OR² and —SR²;

[0419] X² is selected from —OR³ and —SR³;
[0420] B¹ and B² are independently selected from optionally substituted nitrogenous bases, wherein each optional substituent is independently selected from halogen, —OR¹⁰⁰, —SR¹⁰⁰, —N(R¹⁰⁰)₂, —S(O)R¹⁰⁰, —S(O)₂R¹⁰⁰, —C(O)R¹⁰⁰, —C(O)OR¹⁰⁰, —OC(O)R¹⁰⁰, —NO₂, ═O, ═S, ═N(R¹⁰⁰), —CN, R⁶, and —X³;

[0421] Y is selected from —OR⁴, —SR⁴, —NR⁴R⁴, and halogen;

[0422] Z is selected from —OR⁵, —SR⁵, and —NR⁵R⁵;
[0423] R¹, R², R³, R⁴, and R⁵ are independently selected from a —X³; hydrogen, —C(═O)R¹⁰⁰, —C(═O)OR¹⁰⁰ and —C(═O)NR¹⁰⁰; C₁₋₁₀ alkyl, C₂₋₁₀ alkenyl, C₂₋₁₀ alkynyl, each of which is independently optionally substituted at each occurrence with one or more substituents selected from halogen, —OR¹⁰⁰, —SR¹⁰⁰, —N(R¹⁰⁰)₂, —S(O)R¹⁰⁰, —S(O)₂R¹⁰⁰, —C(O)R¹⁰⁰, —C(O)OR¹⁰⁰, —OC(O)R¹⁰⁰, —NO₂, ═O, ═S, ═N(R¹⁰⁰), —P(O)(OR¹⁰⁰)₂, —OP(O)(OR¹⁰⁰)₂, —CN, C₃₋₁₀ carbocycle and 3- to 10-membered heterocycle; and C₃₋₁₀ carbocycle and 3- to 10-membered heterocycle, wherein each C₃₋₁₀ carbocycle and 3- to 10-membered heterocycle in R¹, R², R³, R⁴, and R⁵ is optionally substituted with one or more substituents selected from halogen, —OR¹⁰⁰, —SR¹⁰⁰, —N(R¹⁰⁰)₂, —S(O)R¹⁰⁰, —S(O)₂R¹⁰⁰, —C(O)R¹⁰⁰, —C(O)OR¹⁰⁰, —OC(O)R¹⁰⁰, —NO₂, ═O, ═S, ═N(R¹⁰⁰), —P(O)(OR¹⁰⁰)₂, —OP(O)(OR¹⁰⁰)₂, —CN, C₁₋₆ alkyl, C₂₋₆ alkenyl, C₂₋₆ alkynyl;
[0424] R⁶ is independently selected from —C(═O)R¹⁰⁰, —C(═O)OR¹⁰⁰ and —C(═O)NR¹⁰⁰; C₁₋₁₀ alkyl, C₂₋₁₀ alkenyl, C₂₋₁₀ alkynyl, each of which is independently optionally substituted at each occurrence with one or more substituents selected from halogen, —OR¹⁰⁰, —SR¹⁰⁰, —N(R¹⁰⁰)₂, —S(O)R¹⁰⁰, —S(O)₂R¹⁰⁰, —C(O)R¹⁰⁰, —C(O)OR¹⁰⁰, —OC(O)R¹⁰⁰, —NO₂, ═O, ═S, ═N(R¹⁰⁰), —P(O)(OR¹⁰⁰)₂, —OP(O)(OR¹⁰⁰)₂, —CN, C₃₋₁₀ carbocycle and 3- to 10-membered heterocycle; and C₃₋₁₀ carbocycle and 3- to 10-membered heterocycle, wherein each C₃₋₁₀ carbocycle and 3- to 10-membered heterocycle in R⁶ is optionally substituted with one or more substituents selected from halogen, —OR¹⁰⁰, —SR¹⁰⁰, —N(R)₂, —S(O)R¹⁰⁰, —S(O)₂R¹⁰⁰, —C(O)R¹⁰⁰, —C(O)OR¹⁰⁰, —OC(O)R¹⁰⁰, —NO₂, ═O, ═S, ═N(R¹⁰⁰), —P(O)(OR¹⁰⁰)₂, —OP(O)(OR¹⁰⁰)₂, —CN, C₁₋₆ alkyl, C₂₋₆ alkenyl, C₂₋₆ alkynyl;

[0425] R¹⁰⁰ at each occurrence is independently selected from hydrogen; and C₁₋₁₀ alkyl, C₂₋₁₀ alkenyl, C₂₋₁₀ alkynyl, C₃₋₁₀ carbocycle, and 3- to 10-membered heterocycle each of which is independently optionally substituted at each occurrence with one or more substituents selected from halogen, —CN, —NO₂, ═O, ═S, and haloalkyl; and

[0426] X³ is a linker moiety, wherein at least one of R¹, R², R³, R⁴, R⁵, X¹, X², a B¹ substituent and a B² substituent is —X³.

[0427] In various embodiments, the compound of Formula (II) is represented by a structure of Formula (IIA):

[chemical structure]

or pharmaceutically acceptable salts thereof.

[0428] In various embodiments, the compound of Formula (II) is represented by a structure of Formula (IIB):

[chemical structure]

or a pharmaceutically acceptable salt thereof.

[0429] In various embodiments, B¹ and B² are independently selected from optionally substituted purines. B¹ and B² may be each, independently selected from one another, adenine, guanine, and derivatives thereof. B¹ and B² may be independently selected from optionally substituted adenine, optionally substituted guanine, optionally substituted xanthine, optionally substituted hypoxanthine, optionally substituted theobromine, optionally substituted caffeine, optionally substituted uric acid, and optionally substituted isoguanine. In a preferred embodiment, B¹ and B² are independently selected from optionally substituted adenine and optionally substituted guanine.

[0430] In various embodiments, B¹ is substituted by X³ and optionally one or more additional substituents independently selected from halogen, —OR¹⁰⁰, —SR¹⁰⁰, —N(R¹⁰⁰)₂, —S(O)R¹⁰⁰, —S(O)₂R¹⁰⁰, —C(O)R¹⁰⁰, —C(O)OR¹⁰⁰, —OC(O)R¹⁰⁰, —NO₂, ═O, ═S, ═N(R¹⁰⁰), —CN, and R⁶. For example, B¹ may be represented by:

[chemical structure]

and wherein B¹ is optionally further substituted by one or more substituents.

[0431] In various embodiments, B is substituted by X³ and optionally one or more additional substituents independently selected from halogen, —OR¹⁰⁰, —SR¹⁰⁰, —N(R¹⁰⁰)₂, —S(O)R¹⁰⁰, —S(O)₂R¹⁰⁰, —C(O)R¹⁰⁰, —C(O)OR¹⁰⁰, —OC(O)R¹⁰⁰, —NO₂, ═O, ═S, ═N(R¹⁰⁰), —CN, and R⁶. For example, B² may be represented by:

[chemical structure]

and wherein B² is optionally further substituted by one or more substituents.

[0432] In some embodiments, B¹ is represented by

[chemical structure]

and B² is represented by

[chemical structure]

In some embodiments, B¹ is represented by

[chemical structure]

and B² is represented by

[chemical structure]

[0433] In various embodiments, X¹ is selected from —O—X³ and —S—X³. In some embodiments, X¹ is selected from —OH and —SH. In some embodiments, X¹ is —SH.

[0434] In various embodiments, X² is selected from —O—X³ and —S—X³. In some embodiments, X² is selected from —OH and —SH. In some embodiments, X² is —S—X³.

[0435] In some embodiments, X¹ is —SH and X² is —S—X³.

[0436] In certain embodiments, Y is selected from —NR⁴X³, —S—X³, and —O—X³. In some embodiments, Y is selected from —OH, —SH, —O—C₁₋₁₀ alkyl, —NH(C₁₋₁₀ alkyl), and —NH₂. In a preferred embodiment, Y is selected from —OH.

[0437] In various embodiments, Z is selected from —NR⁴X³, —S—X³, and —O—X³. In some embodiments, Z is selected from —OH, —SH, —O—C₁₋₁₀ alkyl, —NH(C₁₋₁₀ alkyl), and —NH₂.

[0438] In various embodiments, —X³ is represented by the formula:

[chemical structure]

[0439] In some embodiments, —X³ is represented by the formula:

[chemical structure]

wherein RX comprises a reactive moiety, such a maleimide.

[0440] In some embodiments, —X³ is represented by the formula:

[chemical structure]

wherein RX* is a reactive moiety that has reacted with a moiety on an antibody construct to form a conjugate.

[0441] In some embodiments, —X³ is represented by the formula:

[chemical structure]

wherein RX is a reactive moiety, such as a maleimide.

[0442] In some embodiments, —X³ is represented by the formula:

[chemical structure]

wherein RX* is a reactive moiety that has reacted with a moiety on an antibody construct to form a conjugate, such as an antibody drug conjugate.

[0443] In some embodiments, the compound is represented by the formula:

[chemical structure]

or a pharmaceutically acceptable salt thereof. The compound may be represented by the formula:

[chemical structure]

or a pharmaceutically acceptable salt thereof.

[chemical structure]

[0444] In some embodiments, the compound is represented by the formula:

[chemical structure]

or a pharmaceutically acceptable salt thereof. The compound may be represented by the formula:

[chemical structure]

or a pharmaceutically acceptable salt thereof. The compound may be represented by the formula:

[chemical structure]

or a pharmaceutically acceptable salt thereof.

[0445] In some embodiments, the compound is represented by the formula:

[chemical structure]

or a pharmaceutically acceptable salt thereof. The compound may be represented by the formula:

[chemical structure]

or a pharmaceutically acceptable salt thereof.

[chemical structure]

[0446] In some embodiments, the compound is represented by the formula:

[chemical structure]

or a pharmaceutically acceptable salt thereof. The compound may be represented by the formula:

[chemical structure]

or a pharmaceutically acceptable salt thereof. The compound may be represented by the formula:

[chemical structure]

or a pharmaceutically acceptable salt thereof.

[chemical structure]

[0447] The compound is represented by the formula:

[chemical structure]

or a pharmaceutically acceptable salt thereof.

[0448] The compound may be represented by the formula:

[chemical structure]

or a pharmaceutically acceptable salt thereof.

[0449] In some embodiments, the compound is represented by the formula:

[chemical structure]

or a pharmaceutically acceptable salt thereof. The compound may be represented by the formula:

[chemical structure]

or a pharmaceutically acceptable salt thereof. The compound may be represented by the formula:

[chemical structure]

or a pharmaceutically acceptable salt thereof.

[0450] In some embodiments, the compound is represented by the formula:

[chemical structure]

or a pharmaceutically acceptable salt thereof. The compound may be represented by the formula:

[chemical structure]

or a pharmaceutically acceptable salt thereof. The compound may be represented by the formula:

[chemical structure]

for a pharmaceutically acceptable salt thereof.

[0451] In some embodiments, the compound is represented by the formula:

[chemical structure]

or a pharmaceutically acceptable salt thereof. The compound may be represented by the formula:

[chemical structure]

or a pharmaceutically acceptable salt thereof. The compound may be represented by the formula:

[chemical structure]

or a pharmaceutically acceptable salt thereof.

[0452] In some embodiments, the compound is represented by the formula:

[chemical structure]

or a pharmaceutically acceptable salt thereof. The compound may be represented by the formula:

[chemical structure]

or a pharmaceutically acceptable salt thereof. The compound may be represented by the formula:

[chemical structure]

or a pharmaceutically acceptable salt thereof.

[0453] In some embodiments, the immune-stimulatory compound is a damage-associated molecular pattern molecule or a pathogen-associated molecular pattern molecule.

[0454] In some embodiments, the immune-stimulatory compound is a Toll-like receptor agonist, STING agonist, or RIG-I agonist.

[0455] In some embodiments, the immune-stimulatory compound is a CpG oligonucleotide, Poly G10, Poly G3, Poly I:C, Lipopolysaccharide, zymosan, flagellin, Pam3CSK4, PamCysPamSK4, dsRNA, a diacylated lipopeptide, a triacylated lipoprotein, lipoteichoic acid, a peptidoglycan, a cyclic dinucleotide, a 5′ppp-dsRNA, S-27609, CL307, UC-IV150, imiquimod, gardiquimod, resiquimod, motolimod, VTS-1463GS-9620, GSK2245035, TMX-101, TMX-201, TMX-202, isatoribine, AZD8848, MEDI9197, 3M-051, 3M-852, 3M-052, 3M-854A, S-34240, KU34B, SB9200, SB11285, 8-substituted imidazo[1,5-a]pyridine, or CL663.

[0456] In some embodiments, the immune-stimulatory compound is an inhibitor of TGFB, Beta-Catenin, PI3K-beta, STAT3, IL-10, IDO, or TDO. In some embodiments, the immune-stimulatory compound is LY2109761, GSK263771, iCRT3, iCRT5, iCRT14, LY2090314, CGX-1321, PRI-724, BC21, ZINCO2092166, LGK974, IWP2, LY3022859, LY364947, SB431542, AZD8186, SD-208, indoximod (NLG8189), F001287, GDC-0919, epacadostat (INCB024360), RG70099, 1-methyl-L-tryptophan, methylthiohydantoin tryptophan, brassinin, annulin B, exiguamine A, PIM, LM10, 8-substituted 2-amino-3H-benzo[b]azepine-4-carboxamide, or INCB023843.

[0457] In some embodiments, the immune-stimulatory compound does not reduce the affinity of the recombinant bispecific antibody for binding to the tumor associated antigen or to the antigen on the antigen presenting cell.

### Chemotherapeutic Agent Recombinant Bispecific Antibody Conjugates

[0458] In certain embodiments, the recombinant bispecific antibodies further comprise a chemotherapeutic compound. The recombinant bispecific antibody further comprising a chemotherapeutic compound can be a recombinant bispecific antibody conjugate. The chemotherapeutic compound can be coupled to the Fc region of the recombinant bispecific antibody. In certain embodiments, the chemotherapeutic compound is covalently coupled to the recombinant bispecific antibody by a linker creating a recombinant bispecific antibody conjugate. In certain embodiments, the coupled chemotherapeutic compound comprises an alkylating agent (e.g., cyclophosphamide, ifosfamide, chlorambucil, busulfan, melphalan, mechlorethamine, uramustine, thiotepa, nitrosoureas, or temozolomide), an anthracycline (e.g., doxorubicin, adriamycin, daunorubicin, epirubicin, or mitoxantrone), a cytoskeletal disruptor (e.g., paclitaxel or docetaxel), a histone deacetylase inhibitor (e.g., vorinostat or romidepsin), an inhibitor of topoisomerase (e.g., irinotecan, topotecan, amsacrine, etoposide, or teniposide), a kinase inhibitor (e.g., bortezomib, erlotinib, gefitinib, imatinib, vemurafenib, or vismodegib), a nucleoside analog or precursor analog (e.g., azacitidine, azathioprine, capecitabine, cytarabine, fluorouracil, gemcitabine, hydroxyurea, mercaptopurine, methotrexate, or thioguanine), a peptide antibiotic (e.g., actinomycin or bleomycin), a platinum-based agent (e.g., cisplatin, oxaloplatin, or carboplatin), or a plant alkaloid (e.g., vincristine, vinblastine, vinorelbine, vindesine, podophyllotoxin, paclitaxel, or docetaxel). In some embodiments, the chemotherapeutic agent is a nucleoside analog. In some embodiments, the chemotherapeutic agent is gemcitabine. The chemotherapeutic compound can be coupled to the recombinant bispecific antibody via a linker, as further described herein.

### Linkers

[0459] The conjugates and methods of using such conjugates described herein include conjugates that can comprise a linker, e.g., cleavable or non-cleavable linker, attached to an antibody construct or to a recombinant bispecific antibody. Linkers of the conjugates and methods described herein may not affect the binding of active portions of a conjugate (e.g., active portions include antigen binding domains, Fc domains, Fc comprising domains, binding domains, antibodies (e.g., recombinant bispecific antibodies), antibody constructs, agonists or the like) to a target, which can be a cognate binding partner such as an antigen. A linker can form a linkage between different parts of a conjugate. A conjugate can comprise multiple linkers. These linkers can be the same linkers or different linkers. As will be appreciated by the skilled artisan, the following description of conjugates comprising antibody constructs is applicable to conjugates comprising recombinant bispecific antibodies.

[0460] As will be appreciated by skilled artisans, the linkers can link the immune-stimulatory compound to the antibody construct of the conjugate by forming a covalent linkage to the immune-stimulatory compound at one location and a covalent linkage to the antibody construct of the conjugate at another location. The covalent linkages can be formed by reaction between functional groups on the linker and functional groups on the compounds and antibody construct. As used herein, the expression “linker” can include (i) unconjugated forms of the linker that can include a functional group capable of covalently linking the linker to an immune-stimulatory compound and a functional group capable of covalently linking the linker to an antibody construct; (ii) partially conjugated forms of the linker that can include a functional group capable of covalently linking the linker to an antibody construct of the conjugate and that can be covalently linked to an immune-stimulatory compound, or vice versa; and (iii) fully conjugated forms of the linker that can be covalently linked to both an immune-stimulatory compound and an antibody construct. In some specific embodiments immune-stimulatory conjugates described herein, moieties comprising the functional groups on the linker and covalent linkages formed between the linker and antibody construct of the conjugate can be specifically illustrated as Rx and LK, respectively. One embodiment pertains to a conjugate formed by contacting an antibody construct that binds to a cell surface receptor or tumor antigen expressed on a tumor cell with a linker described herein under conditions in which the linker covalently links to the antibody construct. One embodiment pertains to a method of making a conjugate formed by contacting a linker described herein under conditions in which the linker covalently links to an antibody construct. One embodiment pertains to a method of stimulating immune activity in a cell that expresses CD40, comprising contacting the cell with a conjugate described herein that is capable of binding the cell, under conditions in which the conjugate binds the cell.

[0461] Attachment via a linker can involve incorporation of a linker between parts of a conjugate. A linker can be short, flexible, rigid, cleavable, non-cleavable, hydrophilic, or hydrophobic. A linker can contain segments that have different characteristics, such as segments of flexibility or segments of rigidity. The linker can be chemically stable to extracellular environments, for example, chemically stable in the blood stream, or may include linkages that are not stable. The linker can include linkages that are designed to cleave and/or immolate or otherwise breakdown specifically or non-specifically inside cells. A cleavable linker can be sensitive to enzymes. A cleavable linker can be cleaved by enzymes such as proteases. A cleavable linker can be contain a valine-citrulline peptide or a valine-alanine peptide. A valine-citrulline- or valine-alanine-containing linker can contain a pentafluorophenyl group. A valine-citrulline or valine-alanine-containing linker can contain a succimide or a maleimide group. A valine-citrulline- or valine-alanine-containing linker can contain a para aminobenzoic acid (PABA) group. A valine-citrulline- or valine-alanine-containing linker can contain a PABA group and a pentafluorophenyl group. A valine-citrulline- or valine-alanine-containing linker can contain a PABA group and a succinimide group. A valine-citrulline- or valine-alanine-containing linker can contain a PABA group and a maleimide group. A non-cleavable linker can be protease insensitive. A non-cleavable linker can contain a maleimide group. A non-cleavable linker can contain a succinimide group. A non-cleavable linker can be maleimidocaproyl linker. A maleimidocaproyl linker can comprise N-maleimidomethylcyclohexane-1-carboxylate. A maleimidocaproyl linker can contain a succinimide group. A maleimidocaproyl linker can contain pentafluorophenyl group. A linker can be a combination of a maleimidocaproyl group and one or more polyethylene glycol molecules. A linker can be a maleimide-PEG4 linker. A linker can be a combination of a maleimidocaproyl linker containing a succinimide group and one or more polyethylene glycol molecules. A linker can be a combination of a maleimidocaproyl linker containing a pentafluorophenyl group and one or more polyethylene glycol molecules. A linker can contain maleimides linked to polyethylene glycol molecules in which the polyethylene glycol can allow for more linker flexibility or can be used lengthen the linker. A linker can be a (maleimidocaproyl)-(valine-citrulline)-(para-aminobenzyloxycarbonyl) linker. A linker can be a THIOMAB linker. A THIOMAB linker can be a (maleimidocaproyl)-(valine-citrulline)-(para-aminobenzyloxycarbonyl) linker. A linker can also be an alkylene, alkenylene, alkynylene, polyether, polyester, polyamide, polyamino acids, polypeptides, cleavable peptides, or aminobenzylcarbamates. A linker can contain a maleimide at one end and an N-hydroxysuccinimidyl ester at the other end. A linker can contain a lysine with an N-terminal amine acetylated, and a valine-citrulline cleavage site. A linker can be a link created by a microbial transglutaminase, wherein the link can be created between an amine-containing moiety and a moiety engineered to contain glutamine as a result of the enzyme catalyzing a bond formation between the acyl group of a glutamine side chain and the primary amine of a lysine chain. A linker can contain a reactive primary amine. A linker can be a Sortase A linker. A Sortase A linker can be created by a Sortase A enzyme fusing an LXPTG recognition motif (SEQ ID NO: 672) to an N-terminal GGG motif to regenerate a native amide bond. The linker created can therefore link a moiety attached to the LXPTG recognition motif (SEQ ID NO: 672) with a moiety attached to the N-terminal GGG motif. A linker can be a link created between an unnatural amino acid on one moiety reacting with oxime bond that was formed by modifying a ketone group with an alkoxyamine on another moiety. A moiety can be a conjugate. A moiety can be an antibody construct, such as an antibody. A moiety can be an immune-stimulatory compound. A moiety can be a binding domain. A linker can be unsubstituted or substituted, for example, with a substituent. A substituent can include, for example, hydroxyl groups, amino groups, nitro groups, cyano groups, azido groups, carboxyl groups, carboxaldehyde groups, imine groups, alkyl groups, alkenyl groups, alkynyl groups, alkoxy groups, acyl groups, acyloxy groups, amide groups, and ester groups.

[0462] In a conjugate as described herein, the immune-stimulatory compound can be linked to the antibody construct of the conjugate by way of linkers. The linker linking an immune-stimulatory compound to the antibody construct of the conjugate can be short, long, hydrophobic, hydrophilic, flexible or rigid, or may be composed of segments that each independently have one or more of the above-mentioned properties such that the linker may include segments having different properties. The linkers can be polyvalent such that they covalently link more than one immune-stimulatory compound to a single site on the antibody construct, or monovalent such that covalently they link a single immune-stimulatory compound to a single site on the antibody construct of the the conjugate.

[0463] Exemplary polyvalent linkers that may be used to link many immune-stimulatory compounds to an antibody construct of the conjugate are described. For example, Fleximer® linker technology has the potential to enable high-DAR conjugate with good physicochemical properties. As shown below, the Fleximer® linker technology is based on incorporating drug molecules into a solubilizing poly-acetal backbone via a sequence of ester bonds. The methodology renders highly-loaded conjugates (DAR up to 20) whilst maintaining good physicochemical properties. This methodology could be utilized with immune-stimulatory compound as shown in the Scheme below.

[chemical structure]

[0464] To utilize the Fleximer® linker technology depicted in the scheme above, an aliphatic alcohol can be present or introduced into the immune-stimulatory compound. The alcohol moiety is then conjugated to an alanine moiety, which is then synthetically incorporated into the Fleximer® linker. Liposomal processing of the conjugate in vitro releases the parent alcohol-containing drug.

[0465] By way of example and not limitation, some cleavable and noncleavable linkers that may be included in the conjugates described herein are described below.

[0466] Cleavable linkers can be cleavable in vitro and in vivo. Cleavable linkers can include chemically or enzymatically unstable or degradable linkages. Cleavable linkers can rely on processes inside the cell to liberate an immune-stimulatory compound, such as reduction in the cytoplasm, exposure to acidic conditions in the lysosome, or cleavage by specific proteases or other enzymes within the cell. Cleavable linkers can incorporate one or more chemical bonds that are either chemically or enzymatically cleavable while the remainder of the linker can be non-cleavable.

[0467] A linker can contain a chemically labile group such as hydrazone and/or disulfide groups. Linkers comprising chemically labile groups can exploit differential properties between the plasma and some cytoplasmic compartments. The intracellular conditions that can facilitate immune-stimulatory compound release for hydrazone containing linkers can be the acidic environment of endosomes and lysosomes, while the disulfide containing linkers can be reduced in the cytosol, which can contain high thiol concentrations, e.g., glutathione. The plasma stability of a linker containing a chemically labile group can be increased by introducing steric hindrance using substituents near the chemically labile group.

[0468] Acid-labile groups, such as hydrazone, can remain intact during systemic circulation in the blood's neutral pH environment (pH 7.3-7.5) and can undergo hydrolysis and can release the immune-stimulatory compound once the conjugate is internalized into mildly acidic endosomal (pH 5.0-6.5) and lysosomal (pH 4.5-5.0) compartments of the cell. This pH dependent release mechanism can be associated with nonspecific release of the drug. To increase the stability of the hydrazone group of the linker, the linker can be varied by chemical modification, e.g., substitution, allowing tuning to achieve more efficient release in the lysosome with a minimized loss in circulation.

[0469] Hydrazone-containing linkers can contain additional cleavage sites, such as additional acid-labile cleavage sites and/or enzymatically labile cleavage sites. Conjugates including exemplary hydrazone-containing linkers can include, for example, the following structures:

[chemical structure]

wherein D and Ab represent the immune-stimulatory compound and antibody construct, respectively, and n represents the number of immune-stimulatory compound—linkers linked to the antibody construct. In certain linkers such as linker (Ig), the linker can comprise two cleavable groups—a disulfide and a hydrazone moiety. For such linkers, effective release of the unmodified free immune-stimulatory compound can require acidic pH or disulfide reduction and acidic pH. Linkers such as (Ih) and (Ii) can be effective with a single hydrazone cleavage site.

[0470] Other acid-labile groups that can be included in linkers include cis-aconityl-containing linkers. cis-Aconityl chemistry can use a carboxylic acid juxtaposed to an amide bond to accelerate amide hydrolysis under acidic conditions.

[0471] Cleavable linkers can also include a disulfide group. Disulfides can be thermodynamically stable at physiological pH and can be designed to release the immune-stimulatory compound upon internalization inside cells, wherein the cytosol can provide a significantly more reducing environment compared to the extracellular environment. Scission of disulfide bonds can require the presence of a cytoplasmic thiol cofactor, such as (reduced) glutathione (GSH), such that disulfide-containing linkers can be reasonably stable in circulation, selectively releasing the immune-stimulatory compound in the cytosol. The intracellular enzyme protein disulfide isomerase, or similar enzymes capable of cleaving disulfide bonds, can also contribute to the preferential cleavage of disulfide bonds inside cells. GSH can be present in cells in the concentration range of 0.5-10 mM compared with a significantly lower concentration of GSH or cysteine, the most abundant low-molecular weight thiol, in circulation at approximately 5 μM. Tumor cells, where irregular blood flow can lead to a hypoxic state, can result in enhanced activity of reductive enzymes and therefore even higher glutathione concentrations. The in vivo stability of a disulfide-containing linker can be enhanced by chemical modification of the linker, e.g., use of steric hindrance adjacent to the disulfide bond.

[0472] Conjugates including exemplary disulfide-containing linkers can include the following structures:

[chemical structure]

wherein D and Ab represent the immune-stimulatory compound and antibody construct, respectively, n represents the number of immune-stimulatory compound-linkers linked to the antibody construct and R is independently selected at each occurrence from hydrogen or alkyl, for example. Increasing steric hindrance adjacent to the disulfide bond can increase the stability of the linker. Structures such as (Ij) and (Il) can show increased in vivo stability when one or more R groups is selected from a lower alkyl such as methyl.

[0473] Another type of linker that can be used is a linker that is specifically cleaved by an enzyme. For example, the linker can be cleaved by a lysosomal enzyme. Such linkers can be peptide-based or can include peptidic regions that can act as substrates for enzymes. Peptide based linkers can be more stable in plasma and extracellular milieu than chemically labile linkers.

[0474] Peptide bonds can have good serum stability, as lysosomal proteolytic enzymes can have very low activity in blood due to endogenous inhibitors and the unfavorably high pH value of blood compared to lysosomes. Release of an immune-stimulatory compound from a conjugate can occur due to the action of lysosomal proteases, e.g., cathepsin and plasmin. These proteases can be present at elevated levels in certain tumor tissues. The linker can be cleavable by a lysosomal enzyme. The lysosomal enzyme can be, for example, cathepsin B, β-glucuronidase, or β-galactosidase.

[0475] In a linker, a cleavable peptide can be selected from tetrapeptides such as Gly-Phe-Leu-Gly (SEQ ID NO: 1332), Ala-Leu-Ala-Leu (SEQ ID NO: 1333) or dipeptides such as Val-Cit, Val-Ala, and Phe-Lys. Dipeptides can have lower hydrophobicity compared to longer peptides, depending on the composition of the peptide.

[0476] A variety of dipeptide-based cleavable linkers can be used in the conjugates described herein.

[0477] Enzymatically cleavable linkers can include a self-immolative spacer to spatially separate the immune-stimulatory compound from the site of enzymatic cleavage. The direct attachment of an immune-stimulatory compound to a peptide linker can result in proteolytic release of an amino acid adduct of the immune-stimulatory compound, thereby impairing its activity. The use of a self-immolative spacer can allow for the elimination of the fully active, chemically unmodified immune-stimulatory compound upon amide bond hydrolysis.

[0478] One self-immolative spacer can be a bifunctional para-aminobenzyl alcohol group, which can link to the peptide through the amino group, forming an amide bond, while amine containing immune-stimulatory compounds can be attached through carbamate functionalities to the benzylic hydroxyl group of the linker (to give a p-amidobenzylcarbamate, PABC). The resulting pro-immune-stimulatory compound can be activated upon protease-mediated cleavage, leading to a 1,6-elimination reaction releasing the unmodified immune-stimulatory compound, carbon dioxide, and remnants of the linker group. The following scheme depicts the fragmentation of p-amidobenzyl carbamate and release of the immune-stimulatory compound:

[chemical structure]

wherein X-D represents the unmodified immune-stimulatory compound.

[0479] The enzymatically cleavable linker can be a ß-glucuronic acid-based linker. Facile release of the immune-stimulatory compound can be realized through cleavage of the ß-glucuronide glycosidic bond by the lysosomal enzyme ß-glucuronidase. This enzyme can be abundantly present within lysosomes and can be overexpressed in some tumor types, while the enzyme activity outside cells can be low. ß-Glucuronic acid-based linkers can be used to circumvent the tendency of a conjugate to undergo aggregation due to the hydrophilic nature of ß-glucuronides. In certain embodiments, ß-glucuronic acid-based linkers can link an antibody construct to a hydrophobic immune-stimulatory compound. The following scheme depicts the release of an immune-stimulatory compound (D) from an antibody construct of the conjugate (Ab) containing a ß-glucuronic acid-based linker:

[chemical structure]

[0480] A variety of cleavable β-glucuronic acid-based linkers useful for linking drugs such as auristatins, camptothecin and doxorubicin analogues, CBI minor-groove binders, and psymberin to antibodies have been described. All of these β-glucuronic acid-based linkers may be used in the conjugates comprising an immune-stimulatory compound described herein. In certain embodiments, the enzymatically cleavable linker is a β-galactoside-based linker. β-Galactoside is present abundantly within lysosomes, while the enzyme activity outside cells is low.

[0481] Additionally, immune-stimulatory compounds containing a phenol group can be covalently bonded to a linker through the phenolic oxygen. One such linker relies on a methodology in which a diamino-ethane “Space Link” is used in conjunction with traditional “PABO”-based self-immolative groups to deliver phenols.

[0482] Immune-stimulatory compounds containing an aromatic or aliphatic hydroxyl group can be covalently bonded to a linker through the hydroxyl group using a methodology that relies on a methylene carbamate linkage, as described in WO 2015/095755.

[0483] Cleavable linkers can include non-cleavable portions or segments, and/or cleavable segments or portions can be included in an otherwise non-cleavable linker to render it cleavable. By way of example only, polyethylene glycol (PEG) and related polymers can include cleavable groups in the polymer backbone. For example, a polyethylene glycol or polymer linker can include one or more cleavable groups such as a disulfide, a hydrazone or a dipeptide.

[0484] Other degradable linkages that can be included in linkers can include ester linkages formed by the reaction of PEG carboxylic acids or activated PEG carboxylic acids with alcohol groups on an immune-stimulatory compound, wherein such ester groups can hydrolyze under physiological conditions to release the immune-stimulatory compound. Hydrolytically degradable linkages can include, but are not limited to, carbonate linkages; imine linkages resulting from reaction of an amine and an aldehyde; phosphate ester linkages formed by reacting an alcohol with a phosphate group; acetal linkages that are the reaction product of an aldehyde and an alcohol; orthoester linkages that are the reaction product of a formate and an alcohol; and oligonucleotide linkages formed by a phosphoramidite group, including but not limited to, at the end of a polymer, and a 5′ hydroxyl group of an oligonucleotide.

[0485] A linker can comprise an enzymatically cleavable peptide moiety, for example, a linker comprising structural formula (IVa), (IVb), (IVc), or (IVd):

[chemical structure]

or a salt thereof, wherein: peptide represents a peptide (illustrated N→C, wherein peptide includes the amino and carboxy “termini”) a cleavable by a lysosomal enzyme; T represents a polymer comprising one or more ethylene glycol units or an alkylene chain, or combinations thereof; R^{a} is selected from hydrogen, alkyl, sulfonate and methyl sulfonate; R^{y} is hydrogen or C₁₋₄ alkyl-(O)ᵣ—(C₁₋₄ alkylene)ₛ-G¹ or C₁₋₄ alkyl-(N)—[(C₁₋₄ alkylene)-G¹]₂; R^{z} is C₁₋₄ alkyl-(O)ᵣ—(C₁₋₄ alkylene)ₛ-G²; G¹ is SO₃H, CO₂H, PEG 4-32, or sugar moiety; G² is SO₃H, CO₂H, or PEG 4-32 moiety; r is 0 or 1; s is 0 or 1; p is an integer ranging from 0 to 5; q is 0 or 1; x is 0 or 1; y is [symbol] 0 or 1; [symbol] represents the point of attachment of the linker to the immune-stimulatory compound; and * represents the point of attachment to the remainder of the linker.

[0486] In certain embodiments, the peptide can be selected from a tripeptide or a dipeptide. In particular embodiments, the dipeptide can be selected from: Val-Cit; Cit-Val; Ala-Ala; Ala-Cit; Cit-Ala; Asn-Cit; Cit-Asn; Cit-Cit; Val-Glu; Glu-Val; Ser-Cit; Cit-Ser; Lys-Cit; Cit-Lys; Asp-Cit; Cit-Asp; Ala-Val; Val-Ala; Phe-Lys; Lys-Phe; Val-Lys; Lys-Val; Ala-Lys; Lys-Ala; Phe-Cit; Cit-Phe; Leu-Cit; Cit-Leu; Ile-Cit; Cit-Ile; Phe-Arg; Arg-Phe; Cit-Trp; and Trp-Cit, or salts thereof.

[0487] Exemplary embodiments of linkers according to structural formula (IVa) that can be included in the conjugates described herein can include the linkers illustrated below (as illustrated, the linkers include a group suitable for covalently linking the linker in a conjugate and the wavy line or unlinked bond indicates an attachment site for an immune-stimulatory compound):

[chemical structure]

[chemical structure]

[0488] Exemplary embodiments of linkers according to structural formula (IVb), (IVc), or (IVd) that can be included in the conjugates described herein can include the linkers illustrated below (as illustrated, the linkers can include a group suitable for covalently linking the linker to a conjugate and the wavy line indicates an attachment site for an immune-stimulatory compound):

[chemical structure]

[chemical structure]

[chemical structure]

[chemical structure]

[chemical structure]

[chemical structure]

[chemical structure]

[chemical structure]

[chemical structure]

[0489] The linker can contain an enzymatically cleavable sugar moiety, for example, a linker comprising structural formula (Va), (Vb), (Vc), (Vd), or (Ve):

[chemical structure]

[chemical structure]

or a salt thereof, wherein: q is 0 or 1; r is 0 or 1; X¹ is CH₂, O or NH; [symbol] represents the point of attachment of the linker to the immune-stimulatory compound; and represents the point of attachment to the remainder of the linker.

[0490] Exemplary embodiments of linkers according to structural formula (Va) that may be included in the immune-stimulatory conjugates described herein can include the linkers illustrated below (as illustrated, the linkers include a group suitable for covalently linking the linker in a conjugate and the wavy line indicates an attachment site for an immune-stimulatory compound):

[chemical structure]

[chemical structure]

[chemical structure]

[0491] Exemplary embodiments of linkers according to structural formula (Vb) that may be included in the conjugates described herein include the linkers illustrated below (as illustrated, the linkers include a group suitable for covalently linking the linker in a conjugate and the wavy line indicates an attachment site for an immune-stimulatory compound):

[chemical structure]

[chemical structure]

[0492] Exemplary embodiments of linkers according to structural formula (Vc) that may be included in the conjugates described herein include the linkers illustrated below (as illustrated, the linkers include a group suitable for covalently linking the linker in a conjugate and the wavy line indicates an attachment site for an immune-stimulatory compound):

[chemical structure]

[chemical structure]

[0493] Exemplary embodiments of linkers according to structural formula (Vd) that may be included in the conjugates described herein include the linkers illustrated below (as illustrated, the linkers include a group suitable for covalently linking the linker in a conjugate and the wavy line indicates an attachment site for an immune-stimulatory compound):

[chemical structure]

[chemical structure]

[0494] Exemplary embodiments of linkers according to structural formula (Ve) that may be included in the immune-stimulatory conjugates described herein include the linkers illustrated below (as illustrated, the linkers include a group suitable for covalently linking the linker in a conjugate and the wavy line indicates an attachment site for an immune-stimulatory compound):

[chemical structure]

[0495] Although cleavable linkers can provide certain advantages, the linkers comprising the conjugate described herein need not be cleavable. For non-cleavable linkers, the immune-stimulatory compound release may not depend on the differential properties between the plasma and some cytoplasmic compartments. The release of the immune-stimulatory compound can occur after internalization of the conjugate via antigen-mediated endocytosis and delivery to lysosomal compartment, where the conjugate can be degraded to the level of amino acids through intracellular proteolytic degradation. This process can release an immune-stimulatory compound derivative, which is formed by the immune-stimulatory compound, the linker, or a portion thereof, and in some instances the amino acid residue to which the linker was covalently attached. The immune-stimulatory compound derivative from conjugates with non-cleavable linkers can be more hydrophilic and less membrane permeable, which can lead to less bystander effects and less nonspecific toxicities compared to conjugates with a cleavable linker. Conjugates with non-cleavable linkers can have greater stability in circulation than conjugates with cleavable linkers. Non-cleavable linkers can be alkylene chains, or can be polymeric, such as, for example, based upon polyalkylene glycol polymers, amide polymers, or can include segments of alkylene chains, polyalkylene glycols and/or amide polymers. The linker can contain a polyethylene glycol segment having from 1 to 6 ethylene glycol units.

[0496] The linker can be non-cleavable in vivo, for example, a linker according to the formulations below:

[chemical structure]

or salts thereof, wherein: R^{a} is selected from hydrogen, alkyl, sulfonate and methyl sulfonate; R^{x} is a moiety including a functional group capable of covalently linking the linker to an antibody construct of the conjugate; and [symbol] represents the point of attachment of the linker to the immune-stimulatory compound.

[0497] Exemplary embodiments of linkers according to structural formula (VIa)-(VId) that may be included in the conjugates described herein include the linkers illustrated below (as illustrated, the linkers include a group suitable for covalently linking the linker in a conjugate, and [symbol] represents the point of attachment in a conjugate):

[chemical structure]

[0498] Attachment groups that are used to attach the linkers in a conjugate can be electrophilic in nature and include, for example, maleimide groups, activated disulfides, active esters such as NHS esters and HOBt esters, haloformates, acid halides, alkyl, and benzyl halides such as haloacetamides. There are also emerging technologies related to “self-stabilizing” maleimides and “bridging disulfides” that can be used in accordance with the disclosure.

[0499] One example of a “self-stabilizing” maleimide group that hydrolyzes spontaneously under conjugation conditions to give a conjugate species with improved stability is depicted in the schematic below. Thus, the maleimide attachment group is reacted with a sulfhydryl of a antibody construct to give an intermediate succinimide ring. The hydrolyzed (open ring) form of the attachment group is resistant to deconjugation in the presence of plasma proteins.

[chemical structure]

[0500] A method for bridging a pair of sulfhydryl groups derived from reduction of a native hinge disulfide bond has been disclosed and is depicted in the schematic below. An advantage of this methodology can be the ability to synthesize homogenous DAR4 conjugates by full reduction of IgGs (to give 4 pairs of sulfhydryls) followed by reaction with 4 equivalents of the alkylating agent. Conjugates containing “bridged disulfides” can also have increased stability.

[chemical structure]

[0501] Similarly, as depicted below, a maleimide derivative that can bridge a pair of sulfhydryl groups has been developed.

[chemical structure]

[0502] The attachment moiety can contain the following structural formulas (VIIa), (VIIb), or (VIIc):

[chemical structure]

or salts thereof, wherein: R^{q} is H or —O—(CH₂CH₂O)₁₁—CH₃; x is 0 or 1; y is 0 or 1; G² is —CH₂CH₂CH₂SO₃H or —CH₂CH₂O—(CH₂CH₂O)₁₁—CH₃; R^{w} is —O—CH₂CH₂SO₃H or —NH(CO)—CH₂CH₂O—(CH₂CH₂O)₁₂—CH₃; and * represents the point of attachment to the remainder of the linker.

[0503] Exemplary embodiments of linkers according to structural formula (VIIa) and (VIIb) that can be included in the conjugates described herein can include the linkers illustrated below (as illustrated, the linkers can include a group suitable for covalently linking the linker in a conjugate and the wavy line or unlinked bond indicates an attachment site for an immune-stimulatory compound):

[chemical structure]

[chemical structure]

[chemical structure]

[chemical structure]

[chemical structure]

[0504] Exemplary embodiments of linkers according to structural formula (VIIc) that can be included in the conjugates described herein can include the linkers illustrated below (as illustrated, the linkers can include a group suitable for covalently linking the linker in a conjugate):

[chemical structure]

[chemical structure]

### Conjugates

[0505] A conjugate as described herein can comprise an antibody construct or a recombinant bispecific antibody and at least one linker connected to an immune-stimulatory compound. As will be appreciated by the skilled artisan, the following description of conjugates comprising antibody constructs is applicable to conjugates comprising recombinant bispecific antibodies.

[0506] In some aspects, the present disclosure provides a conjugate comprising an immune-stimulatory compound or salt thereof, an antibody construct, and a linker, wherein the compound or salt is linked, i.e., covalently bound, to the antibody construct through the linker. The linker can be selected from a cleavable or non-cleavable linker. In some embodiments, the linker is cleavable. In alternative embodiments, the linker is non-cleavable. Linkers are further described in the present application in the subsequent section, any one of which can be used to connect an antibody to a compound described herein.

[0507] In a conjugate, the drug loading is represented by p, the number of immune-stimulatory compound-linker molecules per antibody construct, or the number of immune-stimulatory compounds per antibody construct, depending on the particular conjugate. Depending on the context, p can represent the average number of immune-stimulatory compounds (-linker) molecules per antibody construct, also referred to the average drug loading. P can range from 1 to 20, from 1-50 or from 1-100. In some conjugates, p is preferably from 1 to 8. In some preferred embodiments, when p represents the average drug loading, p ranges from about 2 to about 5. In some embodiments, p is about 2, about 3, about 4, or about 5. The average number of immune-stimulatory compounds per antibody construct in a preparation may be characterized by conventional means such as mass spectroscopy, HIC, ELISA assay, and HPLC.

[0508] A conjugate can comprise an antibody construct, an immune-stimulatory compound, and a linker. A conjugate can comprise an antibody construct, a pattern recognition receptor (PRR) agonist, and a linker. A conjugate can comprise an antibody construct, a pattern-associated molecular pattern (PAMP) molecule, and a linker. A conjugate can comprise an antibody construct, a damage-associated molecular pattern (DAMP) molecule, and a linker. A conjugate can comprise an antibody construct, a STING agonist, and a linker. A conjugate can comprise an antibody construct, a toll-like receptor agonist molecule, and a linker. A conjugate can comprise an antibody construct, imiquimod, and a linker. A conjugate can comprise an antibody construct, S-27609, and a linker. A conjugate can comprise an antibody construct, CL307, and a linker. A conjugate can comprise an antibody construct, resiquimod, and a linker. A conjugate can comprise an antibody construct, gardiquimod, and a linker. A conjugate can comprise an antibody construct, UC-IV150, and a linker. A conjugate can comprise an antibody construct, KU34B, and a linker. A conjugate can comprise an antibody construct, motolimod, and a linker. A conjugate can comprise an antibody construct, VTX-1463, and a linker. A conjugate can comprise an antibody construct, GS-9620, and a linker. A conjugate can comprise an antibody construct, GSK2245035, and a linker. A conjugate can comprise an antibody construct, TMX-101, and a linker. A conjugate can comprise an antibody construct, TMX-201, and a linker. A conjugate can comprise an antibody construct, TMX-202, and a linker. A conjugate can comprise an antibody construct, isatoribine, and a linker. A conjugate can comprise an antibody construct, AZD8848, and a linker. A conjugate can comprise an antibody construct, MEDI9197, and a linker. A conjugate can comprise an antibody construct, 3M-051, and a linker. A conjugate can comprise an antibody construct, 3M-852, and a linker. A conjugate can comprise an antibody construct, 3M-052, and a linker. A conjugate can comprise an antibody construct, 3M-854A, and a linker. A conjugate can comprise an antibody construct, S-34240, and a linker. A conjugate can comprise an antibody construct, CL663, and a linker. A conjugate can comprise an antibody construct, KIN1148, and a linker. A conjugate can comprise an antibody construct, SB-9200, and a linker. A conjugate can comprise an antibody construct, KIN-100, and a linker. A conjugate can comprise an antibody construct, ADU-S100, and a linker. A conjugate can comprise an antibody construct, KU34B, and a linker.

[0509] A conjugate described herein can have a native Fc domain. A conjugate described herein can have a modified Fc domain. The modified Fc domain can comprise a substitution at more than one amino acid residue such as at 5 different amino acid residues including L235V/F243L/R292P/Y300L/P396L, as at 2 different amino acid residues including S239D/I332E, or as at 3 different amino acid residues including S298A/E333A/K334A. The numbering of amino acids residues described herein can be according to the EU index.

[0510] The linker can be a linker as described herein. A linker can be cleavable, non-cleavable, hydrophilic, or hydrophobic. A cleavable linker can be sensitive to enzymes. A cleavable linker can be cleaved by enzymes such as proteases. A cleavable linker can be a linker containing a valine-citrulline or a valine-alanine peptide. A valine-citrulline- or valine-alanine-containing linker can contain a pentafluorophenyl group. A valine-citrulline- or valine-alanine-containing linker can contain a succimide group. A valine-citrulline- or valine-alanine-containing linker can contain a PABA group. A valine-citrulline- or valine-alanine-containing linker can contain a PABA group and a pentafluorophenyl group. A valine-citrulline-containing or valine-alanine-containing linker can contain a PABA group and a maleimide group. A valine-citrulline-containing or valine-alanine-containing linker can contain a PABA group and a succinimide group. A non-cleavable linker can be protease insensitive. A non-cleavable linker can contain a maleimide group. A non-cleavable linker can be maleimidocaproyl linker. A maleimidocaproyl linker can comprise N-maleimidomethylcyclohexane-1-carboxylate. A maleimidocaproyl linker can contain a succinimide group. A maleimidocaproyl linker can contain pentafluorophenyl group. A linker can be a combination of a maleimide group and one or more polyethylene glycol molecules. A linker can be a combination of a maleimidocaproyl group and one or more polyethylene glycol molecules. A linker can be a maleimide-PEG4 linker. A linker can be a combination of a maleimidocaproyl linker containing a succinimide group and one or more polyethylene glycol molecules. A linker can be a combination of a maleimidocaproyl linker containing a pentafluorophenyl group and one or more polyethylene glycol molecules. A linker can contain maleimides linked to polyethylene glycol molecules in which the polyethylene glycol can allow for more linker flexibility or can be used lengthen the linker. A linker can be a (maleimidocaproyl)-(valine-citrulline)-(para-aminobenzyloxycarbonyl) linker. A linker can be a THIOMAB linker. A THIOMAB linker can be a (maleimidocaproyl)-(valine-citrulline)-(para-aminobenzyloxycarbonyl) linker. A linker can also comprise an alkylene, alkenylene, alkynylene, polyether, polyester, polyamide, polyamino acids, polypeptides, cleavable peptides, or aminobenzylcarbamates. A linker can contain a maleimide at one end and an N-hydroxysuccinimidyl ester at the other end. A linker can contain a lysine with an N-terminal amine acetylated, and a valine-citrulline cleavage site. A linker can be a link created by a microbial transglutaminase, wherein the link is created between an amine-containing moiety and a moiety engineered to contain glutamine as a result of the enzyme catalyzing a bond formation between the acyl group of a glutamine side chain and the primary amine of a lysine chain. A linker can contain a reactive primary amine. A linker can be a Sortase A linker. A Sortase A linker can be created by a Sortase A enzyme fusing an LXPTG recognition motif (SEQ ID NO: 672) to an N-terminal GGG motif to regenerate a native amide bond. The linker created can therefore link a moiety attached to the LXPTG recognition motif (SEQ ID NO: 672) with a moiety attached to the N-terminal GGG motif. A linker can be a link created between an unnatural amino acid on one moiety reacting with oxime bond that was formed by modifying a ketone group with an alkoxyamine on another moiety. A moiety can be an antibody construct. A moiety can be a binding domain. A moiety can be an antibody. A moiety can be an immune-stimulatory compound.

[0511] A conjugate can be an anti-tumor antigen conjugate. The conjugate can comprise an anti-tumor antigen antibody or antibody construct. An antigen recognized by the conjugate can be CD5, CD19, CD20, CD25, CD37, CD30, CD33, CD45, CAMPATH-1, BCMA, CS-1, PD-L1, B7-H3, B7-DC, HLA-DR, carcinoembryonic antigen (CEA), TAG-72, EpCAM, MUC1, folate-binding protein, A33, G250, prostate-specific membrane antigen (PSMA), ferritin, GD2, GD3, GM2, Le^{y}, CA-125, CA19-9, epidermal growth factor, p185HER2, IL-2 receptor, EGRFvIII (de2-7), EGFR, fibroblast activation protein, tenascin, a metalloproteinase, endosialin, vascular endothelial growth factor, αvβ3, WT1, LMP2, HPV E6, HPV E7, Her-2/neu, p53 nonmutant, NY-ESO-1, MelanA/MART1, Ras mutant, gp100, p53 mutant, PR1, bcr-abl, tyrosinase, survivin, PSA, hTERT, a Sarcoma translocation breakpoint fusion protein, EphA2, PAP, ML-IAP, AFP, ERG, NA17, PAX3, ALK, androgen receptor, cyclin B1, polysialic acid, MYCN, RhoC, TRP-2, fucosyl GM1, mesothelin (MSLN), PSCA, MAGE A1, MAGE A3, sLe(animal), CYP1B1, PLAV1, GM3, BORIS, Tn, GloboH, ETV6-AML, NY-BR-1, RGS5, SART3, STn, Carbonic anhydrase IX, PAX5, OY-TES1, Sperm protein 17, LCK, HMWMAA, AKAP-4, SSX2, XAGE 1, B7H3, Legumain, Tie 3, PAGE4, VEGFR2, MAD-CT-1, PDGFR-B, MAD-CT-2, ROR2, TRAIL1, MUC16, MAGE A4, MAGE C2, GAGE, EGFR, CMET, HER3, CA6, NAPI2B, TROP2, Claudin-6 (CLDN6), Claudin-16 (CLDN16), CLDN18.2, RON, LY6E, FRA, DLL3, PTK7, Uroplakin-IB (UPK1B), VTCN1 (B7-H4), STRA6, TMPRSS3, TMRRSS4, TMEM238, C1orf186, LIV1, ROR1, Fos-related antigen 1, VEGFR1, endoglin, LRRC15, VISTA, or a fragment thereof. The conjugate can recognize an antigen that can be expressed on a cell. The conjugate can recognize an antigen that can be expressed by a cell. The conjugate can recognize an antigen that can be expressed in the context of a Major Histocompatibility Complex. The conjugate can recognize an antigen that can stimulate activity of a cell. The conjugate can recognize an antigen that can stimulate an immune response. The conjugate can recognize an antigen that can reduce an immune response. The conjugate can recognize an antigen that can reduce activity of a cell. The conjugate can recognize an antigen that can be expressed on an immune cell. The conjugate can recognize an antigen that can be expressed by an immune cell. The conjugate can recognize an antigen that can be in the context of a Major Histocompatibility Complex. The conjugate can recognize an antigen on a cell wherein the antigen can be involved in stimulating activity of a cell. The conjugate can recognize an antigen on an immune cell that can be involved in the costimulation of an immune cell. The conjugate can recognize an antigen on an immune cell that can be involved in the costimulation of an immune cell during an immune response. The conjugate can recognize a receptor. The conjugate can recognize a receptor on a cell. The conjugate can recognize a receptor ligand. The conjugate can recognize a receptor on a cell wherein the receptor can be involved in stimulating activity of a cell. The conjugate can recognize a receptor on an immune cell. The conjugate can recognize a receptor on an immune cell that can be involved in stimulating activity of an immune cell. The conjugate can recognize a receptor on an immune cell that can be involved in the costimulation of an immune cell. The conjugate can recognize a receptor on an immune cell that can be involved in the costimulation of an immune cell during an immune response. The conjugate can recognize an antigen that can be expressed on an immune cell and that can stimulate activity of an immune cell. The conjugate can recognize an antigen that can be expressed on an immune that can reduce activity of an immune cell. The conjugate can be an anti-CD40 antibody. The conjugate can comprise a light chain of an SBT-040 antibody. The conjugate can comprise an SBT-040-G1WT heavy chain. The conjugate can comprise an SBT-040-G1VLPLL heavy chain. The conjugate can comprise an SBT-040-G1DE heavy chain. The conjugate can comprise an SBT-040-G1AAA heavy chain. The conjugate can comprise an SBT-040-CDR sequence.

[0512] The conjugate can be capable of recognizing a single antigen. The conjugate can be capable of recognizing two or more antigens. The conjugate can be capable of recognizing three or more antigens. The Kd for binding of a second binding domain of a conjugate to an antigen in the presence of an immune-stimulatory compound can be about 2 times, about 3 times, about 4 times, about 5 times, about 6 times, about 7 times, about 8 times, about 9 times, about 10 times, about 15 times, about 20 times, about 25 times, about 30 times, about 35 times, about 40 times, about 45 times, about 50 times, about 60 times, about 70 times, about 80 times, about 90 times, about 100 times, about 110 times, or about 120 times greater than the Kd for binding of the second binding domain to the antigen of a conjugate in the absence of the immune-stimulatory compound. The Kd for binding of a second binding domain of a conjugate to an antigen in the presence of the immune-stimulatory compound can be less than 10 nM. The Kd for binding of a second binding domain of a conjugate to an antigen in the presence of the immune-stimulatory compound can be less than 100 nM, less than 50 nM, less than 20 nM, less than 5 nM, less than 1 nM, or less than 0.1 nM. In contrast, the Kd for binding of a second binding domain of conjugate to an antigen in the presence of the immune-stimulatory compound when the first binding domain is bound to the first binding domain's antigen can be greater than 100 nM. The Kd for binding of a second binding domain of a conjugate to an antigen in the presence of the immune-stimulatory compound when the first binding domain is bound to the first binding domain's antigen can be greater than 100 nM, greater than 200 nM, greater than 300 nM, greater than 400 nM, greater than 500 nM, or greater than 1000 nM. The Kd for binding of a first binding domain of a conjugate to an antigen in the presence of an immune-stimulatory compound can be about 2 times, about 3 times, about 4 times, about 5 times, about 6 times, about 7 times, about 8 times, about 9 times, about 10 times, about 15 times, about 20 times, about 25 times, about 30 times, about 35 times, about 40 times, about 45 times, about 50 times, about 60 times, about 70 times, about 80 times, about 90 times, about 100 times, about 110 times, or about 120 times greater than the Kd for binding of the first binding domain to the antigen of a conjugate in the absence of the immune-stimulatory compound. The Kd for binding of a first binding domain of a conjugate to an antigen in the presence of the immune-stimulatory compound can be less than 10 nM. The Kd for binding of a first binding domain of a conjugate to an antigen in the presence of the immune-stimulatory compound can be less than 100 nM, less than 50 nM, less than 20 nM, less than 5 nM, less than 1 nM, or less than 0.1 nM.

[0513] The conjugate can comprise a binding domain. A binding domain of a conjugate can recognize an antigen. For example, an antigen can be expressed on an immune cell. An antigen can be a peptide or fragment thereof. An antigen can be expressed on an antigen-presenting cell. An antigen can be expressed on a dendritic cell, a macrophage, or a B cell. An antigen can be CD40 and a binding domain can recognize a CD40 antigen. A binding domain of a conjugate can be a CD40 agonist.

[0514] The conjugate can comprise an Fc domain that can bind to an FcR when linked to an immune-stimulatory compound. The conjugate can comprise an Fc domain that can bind to an FcR to initiate FcR-mediated signaling when linked to an immune stimulatory compound. The conjugate can bind to its antigen when linked to an immune-stimulatory compound. The conjugate can bind to its antigen when linked to an immune-stimulatory compound and the Fc domain of the conjugate can bind to an FcR when linked to an immune-stimulatory compound. The conjugate can bind to its antigen when linked to an immune-stimulatory compound and the Fc domain of the conjugate can bind to an FcR to initiate FcR-mediated signaling when linked to an immune stimulatory compound. The Fc domain linked to an immune-stimulatory compound can be a modified Fc domain. The modified Fc domain can comprise a substitution at more than one amino acid residue, such as at 5 different amino acid residues including L235V/F243L/R292P/Y300L/P396L, as at 2 different amino acid residues including S239D/I332E, or as at 3 different amino acid residues including S298A/E333A/K334A. The Kd for binding of an Fc domain to a Fc receptor when the Fc domain is linked to an immune-stimulatory compound can be about 2 times, about 3 times, about 4 times, about 5 times, about 6 times, about 7 times, about 8 times, about 9 times, about 10 times, about 15 times, about 20 times, about 25 times, about 30 times, about 35 times, about 40 times, about 45 times, about 50 times, about 60 times, about 70 times, about 80 times, about 90 times, about 100 times, about 110 times, or about 120 times greater than the Kd for binding of the Fc domain to the Fc receptor in the absence of linking to the immune-stimulatory compound. The Kd for binding of an Fc domain to an Fc receptor when linked to an immune-stimulatory compound can be less than 10 nM. The Kd for binding of an Fc domain to an Fc receptor when linked to an immune-stimulatory compound can be less than 100 nM, less than 50 nM, less than 20 nM, less than 5 nM, less than 1 nM, or less than 0.1 nM. In contrast, the Kd for binding of an Fc domain to an Fc receptor when linked to an immune-stimulatory compound and when the first binding domain is bound to its antigen can be greater than 100 nM. The Kd for binding of an Fc domain to an Fc receptor when linked to an immune-stimulatory compound and when the first binding domain is bound to its antigen can be greater than 100 nM, greater than 200 nM, greater than 300 nM, greater than 400 nM, greater than 500 nM, or greater than 1000 nM.

[0515] The binding domain can be selected in order to recognize an antigen. For example, an antigen can be expressed on an immune cell. An antigen can be expressed on a T cell, a B cell, an NKT cell, or an NK cell. An antigen can be a peptide or fragment thereof. An antigen can be expressed on an antigen-presenting cell. An antigen can be expressed on a dendritic cell, a macrophage, or a B cell. An antigen can be CD40 and a binding domain can recognize a CD40 antigen. A binding domain can be a CD40 agonist. A binding domain can be CD40.

[0516] The immune-stimulatory compound of the conjugate can be a PRR agonist. The PRR agonist can be a toll-like receptor agonist. The toll-like receptor agonist can be a TLR1 agonist, a TLR2 agonist, a TLR3 agonist, a TLR4 agonist, a TLR5 agonist, a TLR6 agonist, a TLR7 agonist, a TLR8 agonist, a TLR9 agonist, a TLR10 agonist, a TLR11 agonist, a TLR12 agonist or a TLR13 agonist. The toll-like receptor agonist can activate two or more TLRs. The immune-stimulatory compound of the conjugate can be a PAMP molecule. The PAMP molecule can be a RIG-I agonist.

[0517] A conjugate can comprise an antibody construct, KU34B, and a linker. An antibody construct of any of the conjugates described herein can have a modified Fc domain of the antibody construct. The modified Fc domain can comprise a substitution at more than one amino acid residue such as at 5 different amino acid residues including L235V/F243L/R292P/Y300L/P396L, as at 2 different amino acid residues including S239D/I332E, or as at 3 different amino acid residues including S298A/E333A/K334A. The numbering of amino acids residues described herein can be according to the EU index.

[0518] A conjugate can be formed by a linker that can connect an antibody construct to an immune-stimulatory compound. A conjugate can be formed by a linker that can connect an antibody construct to a PRR molecule. A conjugate can be formed by a linker that can connect an antibody construct to a PAMP molecule. A conjugate can be formed by a linker that can connect an antibody construct and a DAMP molecule. A conjugate can be formed by a linker that can connect an antibody construct to a PRR, and a linker that can connect an antibody construct and a binding domain. A conjugate can be formed by a linker that can connect an antibody construct to a PAMP molecule, and a linker that can connect an antibody construct and a binding domain. A conjugate can be formed by a linker that can connect an antibody construct and a DAMP molecule, and a linker that can connect an antibody construct and a binding domain.

[0519] A linker can be connected to an antibody construct of a conjugate by a direct linkage between the antibody construct and the linker. A linker can be connected to an anti-CD40 antibody construct by a direct linkage between the anti-CD40 antibody construct and the linker. A linker can be connected to an anti-CD40 antibody by a direct linkage between the anti-CD40 antibody and the linker. A linker can be connected to an anti-tumor antigen antibody construct by a direct linkage between the anti-tumor antigen antibody construct and the linker. A linker can be connected to an anti-tumor antigen antibody by a direct linkage between the anti-tumor antigen antibody and the linker. A direct linkage is a covalent bond.

[0520] A linker can be attached to an antibody construct at any suitable site, such as for example at a terminus of an amino acid sequence or at a side chain of a cysteine residue, an engineered cysteine residue, a lysine residue, a serine residue, a threonine residue, a tyrosine residue, an aspartic acid residue, a glutamic acid residue, a glutamine residue, an engineered glutamine residue, a selenocysteine residue, or a non-natural amino acid. Non-natural amino acids can include para-azidomethyl-1-phenylalanine (pAMF). An attachment site can also be at a residue containing an oxime bond that was formed by modifying a ketone group with an alkoxyamine on another moiety, and a reactive primary amine, such as a reactive primary amine at a C-terminal end of a protein or peptide, such as by using Sortase A linker, which can be created by a Sortase A enzyme fusing an LXPTG recognition motif (SEQ ID NO: 672) to an N-terminal GGG motif to regenerate a native amide bond. The linker created can therefore link a moiety attached to the LXPTG recognition motif (SEQ ID NO: 672) with a moiety attached to the N-terminal GGG motif.

[0521] An attachment can be via any of a number of bonds, for example but not limited to, an amide bond, an ester bond, an ether bond, a carbon-nitrogen bond, a carbon-carbon single, double or triple bond, a disulfide bond, or a thioether bond. A linker can have at least one functional group, which can be linked to the antibody construct or the antibody. Non-limiting examples of the functional groups can include those which form an amide bond, an ester bond, an ether bond, a carbonate bond, a carbamate bond, or a thioether bond, such functional groups can be, for example, amino groups; carboxyl groups; aldehyde groups; azide groups; alkyne and alkene groups; ketones; carbonates; carbonyl functionalities bonded to leaving groups such as cyano and succinimidyl and hydroxyl groups.

[0522] A linker can be connected to an antibody construct at a hinge cysteine. A linker can be connected to an antibody construct at a light chain constant domain lysine. A linker can be connected to an antibody construct at an engineered cysteine in the light chain. A linker can be connected to an antibody construct at an engineered light chain glutamine. A linker can be connected to an antibody construct at an unnatural amino acid engineered into the light chain. A linker can be connected to an antibody construct at a heavy chain constant domain lysine. A linker can be connected to an antibody construct at an engineered cysteine in the heavy chain. A linker can be connected to an antibody construct at an engineered heavy chain glutamine. A linker can be connected to an antibody construct an unnatural amino acid engineered into the heavy chain. Amino acids can be engineered into an amino acid sequence of an antibody construct as described herein, for example, and can be connected to a linker of a conjugate. Engineered amino acids can be added to a sequence of existing amino acids. Engineered amino acids can be substituted for one or more existing amino acids of a sequence of amino acids.

[0523] A linker can be conjugated to an antibody construct via a sulfhydryl group. A linker can be conjugated to an antibody construct via a primary amine. A linker can be a link created between an unnatural amino acid on an antibody construct reacting with oxime bond that was formed by modifying a ketone group with an alkoxyamine on an immune-stimulatory compound. When a linker is connected to an antibody construct at the sites described herein, an Fc domain of the conjugate can bind to Fc receptors. When a linker is connected to an antibody construct at the sites described herein, the antigen binding domain of the conjugate can bind its antigen. When a linker is connected to an antibody construct at the sites described herein, a binding domain of the conjugate can bind its antigen.

[0524] An antibody with engineered reactive cysteine residues can be used to link a binding domain to the antibody. A linker can connect an antibody construct to a binding domain via Sortase A linker. A Sortase A linker can be created by a Sortase A enzyme fusing an LXPTG recognition motif (SEQ ID NO: 672) to an N-terminal GGG motif to regenerate a native amide bond. The linker created can therefore link an antibody construct attached to the LXPTG recognition motif (SEQ ID NO: 672) with a binding domain attached to the N-terminal GGG motif. A binding domain can be connected to a linker by a direct linkage. A direct linkage is a covalent bond. For example, a linker can be attached to a terminus of an amino acid sequence of a binding domain, or could be attached to a side chain modification to the binding domain, such as the side chain of a cysteine residue, an engineered cysteine residue, a lysine residue, a serine residue, a threonine residue, a tyrosine residue, an aspartic acid residue, a glutamic acid residue, a glutamine residue, an engineered glutamine residue, a selenocysteine residue, or a non-natural amino acid. Non-natural amino acids can include para-azidomethyl-1-phenylalanine (pAMF). An attachment can also be at a residue containing an oxime bond that was formed by modifying a ketone group with an alkoxyamine on another moiety, and a reactive primary amine, such as a reactive primary amine at a C-terminal end of a protein or peptide. An attachment can be via any of a number of bonds, for example but not limited to, an amide bond, an ester bond, an ether bond, a carbon-nitrogen bond, a carbon-carbon single double or triple bond, a disulfide bond, or a thioether bond. A linker can have at least one functional group, which can be linked to the binding domain. Non-limiting examples of the functional groups can include those which form an amide bond, an ester bond, an ether bond, a carbonate bond, a carbamate bond, or a thioether bond, such functional groups can be, for example, amino groups; carboxyl groups; aldehyde groups; azide groups; alkyne and alkene groups; ketones; carbonates; carbonyl functionalities bonded to leaving groups such as cyano and succinimidyl and hydroxyl groups. Amino acids can be engineered into an amino acid sequence of the binding domain. Engineered amino acids can be added to a sequence of existing amino acids. Engineered amino acids can be substituted for one or more existing amino acids of a sequence of amino acids. A linker can be conjugated to a binding domain via a sulfhydryl group. A linker can be conjugated to a binding domain via a primary amine. A binding domain can be conjugated to the C-terminal of an Fc domain of a conjugate.

[0525] An antibody or antibody construct with engineered reactive cysteine residues can be used to link an immune-stimulatory compound to the antibody or antibody construct. A linker can connect an antibody construct to an immune-stimulatory compound via linker. A linker can connect an antibody construct to an immune-stimulatory compound via Sortase A linker. A Sortase A linker can be created by a Sortase A enzyme fusing an LXPTG recognition motif (SEQ ID NO: 672) to an N-terminal GGG motif to regenerate a native amide bond. The linker created can therefore link an antibody attached the LXPTG recognition motif (SEQ ID NO: 672) with an immune-stimulatory compound attached to the N-terminal GGG motif. A linker can be a link created between an unnatural amino acid an antibody reacting with oxime bond that was formed by modifying a ketone group with an alkoxyamine on an immune-stimulatory compound. The immune-stimulatory compound can comprise one or more rings selected from carbocyclic and heterocyclic rings. The immune-stimulatory compound can be covalently bound to a linker by a bond to an exocyclic carbon or nitrogen atom on the immune-stimulatory compound. A linker can be conjugated to an immune-stimulatory compound via an exocyclic nitrogen or carbon atom of an immune-stimulatory compound. A linker can be connected to a STING agonist, for example:

[chemical structure]

[chemical structure]

[0526] A linker agonist complex can dissociate under physiological conditions to yield an active agonist.

[0527] A linker can be connected to a PRR agonist by a direct linkage between the PRR agonist and the linker. A linker can be connected to a PAMP molecule by a direct linkage between the PAMP molecule and the linker. A linker can be connected to a toll-like receptor agonist by a direct linkage between the toll-like receptor agonist and the linker.

[0528] Examples of toll-like receptor agonists connected to a linker in a manner able to release an active toll-like receptor agonist under physiologic conditions can include:

[chemical structure]

[0529] Examples of RIG-I agonists connected to a linker in a manner able to release an active toll-like receptor agonist under physiologic conditions can include:

[chemical structure]

[0530] A linker can be connected to a DAMP molecule by a direct linkage between the DAMP molecule and the linker. A direct linkage can be a covalent bond. For example, a linker can be attached to a terminus of an amino acid sequence of an antibody or antibody construct, or could be attached to a side chain modification to the antibody or antibody construct, such as example at a side chain of a cysteine residue, an engineered cysteine residue, a lysine residue, a serine residue, a threonine residue, a tyrosine residue, an aspartic acid residue a glutamic acid residue, a glutamine residue, an engineered glutamine residue, a selenocysteine residue, or a non-natural amino acid. Non-natural amino acids can include para-azidomethyl-1-phenylalanine (pAMF). An attachment can also be at a residue containing an oxime bond that was formed by modifying a ketone group with an alkoxyamine on another moiety, and a reactive primary amine, such as a reactive primary amine at a C-terminal end of a protein or peptide, such as by using Sortase A linker, which can be created by a Sortase A enzyme fusing an LXPTG recognition motif (SEQ ID NO: 672) to an N-terminal GGG motif to regenerate a native amide bond. The linker created can therefore link a moiety attached to the LXPTG recognition motif (SEQ ID NO: 672) with a moiety attached to the N-terminal GGG motif. An attachment can be via any of a number of bonds, for example but not limited to, an amide bond, an ester bond, an ether bond, a carbon-nitrogen bond, a carbon-carbon single double or triple bond, a disulfide bond, or a thioether bond. A linker can have at least one functional group, which can be linked to the antibody construct. Non-limiting examples of the functional groups can include those which form an amide bond, an ester bond, an ether bond, a carbonate bond, a carbamate bond, or a thioether bond, such functional groups can be, for example, amino groups; carboxyl groups; aldehyde groups; azide groups; alkyne and alkene groups; ketones; carbonates; carbonyl functionalities bonded to leaving groups such as cyano and succinimidyl and hydroxyl groups.

[0531] In some embodiments, the linker is not attached to an amino acid residue of the Fc domain of the antibody construct selected from a group consisting of: 221, 222, 224, 227, 228, 230, 231, 223, 233, 234, 235, 236, 237, 238, 239, 240, 241, 243, 244, 245, 246, 247, 249, 250, 258, 262, 263, 264, 265, 266, 267, 268, 269, 270, 271, 272, 273, 274, 275, 276, 278, 280, 281, 283, 285, 286, 288, 290, 291, 292, 293, 294, 295, 296, 297, 298, 299, 300, 302, 305, 313, 317, 318, 320, 322, 323, 324, 325, 326, 327, 328, 329, 330, 331, 332, 333, 334, 335 336, 396, or 428, wherein numbering of amino acid residues in said Fc domain is according to the EU index as in Kabat. In some embodiments, the linker is not attached to an amino acid residue of the Fc domain of the antibody construct selected from a group consisting of: 221, 224, 227, 230, 231, 232, 234, 235, 236, 237, 239, 240, 243, 244, 245, 247, 249, 258, 262, 263, 264, 265, 266, 267, 268, 269, 270, 271, 272, 273, 275, 278, 280, 281, 283, 285, 286, 291, 292, 293, 294, 295, 296, 297, 298, 299, 300, 305, 313, 323, 324, 325, 327, 328, 329, 330, 331, 332, 333, 335, 336, 396, or 428, wherein numbering of amino acid residues in said Fc domain is according to the EU index as in Kabat. In some embodiments, wherein the linker is covalently bound to a residue of the antibody construct selected from the group consisting of a lysine residue, cysteine residue, and a glutamine residue, or is covalently bound to said antibody construct using a Sortase A linker.

[0532] In some embodiments, a linker-immune-stimulatory compound (an ATAC) can be formed by conjugating a noncleavable maleimide-PEG4 linker containing a succinimide group with an immune-stimulatory compound. For example, an ATAC can be N-((4-amino-1-(2-hydroxy-2-methylpropyl)-1H-imidazo[4,5-c]quinolin-2-yl)methyl)-1-(3-(2,5-dioxo-2,5-dihydro-1H-pyrrol-1-yl)propanamido)-N-ethyl-3,6,9,12-tetraoxapentadecan-15-amide (ATAC11); N-(5-(2-amino-3-pentylquinolin-5-yl)pentyl)-1-(3-(2,5-dioxo-2,5-dihydro-1H-pyrrol-1-yl)propanamido)-3,6,9,12-tetraoxapentadecan-15-amide (ATAC12); 1-(3-(2,5-dioxo-2,5-dihydro-1H-pyrrol-1-yl)propanamido)-N-(3-pentylquinolin-2-yl)-3,6,9,12-tetraoxapentadecan-15-amide (ATAC13); 1-(3-(2,5-dioxo-2,5-dihydro-1H-pyrrol-1-yl)propanamido)-N-(1-isobutyl-1H-imidazo[4,5-c]quinolin-4-yl)-3,6,9,12-tetraoxapentadecan-15-amide (ATAC14); 1-(3-(2,5-dioxo-2,5-dihydro-1H-pyrrol-1-yl)propanamido)-N-methyl-N-(2-(3-(7-methylbenzo[1,2-d:3,4-d′]bis(thiazole)-2-yl)ureido)ethyl)-3,6,9,12-tetraoxapentadecan-15-amide (ATAC15); (S)-1-(3-(2,5-dioxo-2,5-dihydro-1H-pyrrol-1-yl)propanamido)-N-(1-((7-methylbenzo[1,2-d:3,4-d′]bis(thiazole)-2-yl)amino)-1-oxo-3-phenylpropan-2-yl)-3,6,9,12-tetraoxapentadecan-15-amide (ATAC16); N-(benzo[d]thiazol-2-yl)-1-(3-(2,5-dioxo-2,5-dihydro-1H-pyrrol-1-yl)propanamido)-N-((8-hydroxyquinolin-7-yl)(4-(trifluoromethoxy)phenyl)methyl)-3,6,9,12-tetraoxapentadecan-15-amide (ATAC17); N-((2R,3R,3aS,7aR,9R,10R,10aS,14aR)-2,9-bis(2-amino-6-oxo-1H-purin-9(6H)-yl)-5,10,12-trihydroxy-5,12-dioxidodecahydrodifuro[3,2-d:3′,2′-j][1,3,7,9,2,8]tetra-oxadiphosphacyclododecin-3-yl)-1-(3-(2,5-dioxo-2,5-dihydro-1H-pyrrol-1-yl)propanamido)-3,6,9,12-tetraoxapentadecan-15-amide (ATAC18); N-((2R,3R,3aS,7aR,9R,10R,10aS,14aR)-2,9-bis(2-amino-6-oxo-1H-purin-9(6H)-yl)-10-hydroxy-5,12-dimercapto-5,12-dioxidodecahydrodifuro[3,2-d:3′,2′-j][1,3,7,9,2,8]tetraoxadiphosphacyclododecin-3-yl)-1-(3-(2,5-dioxo-2,5-dihydro-1H-pyrrol-1-yl)propanamido)-3,6,9,12-tetraoxapentadecan-15-amide (ATAC19); N-(9-((2R,3R,3aS,7aR,9R,10R,10aS,14aR)-9-(2-amino-6-oxo-1H-purin-9(6H)-yl)-3,5,10,12-tetrahydroxy-5,12-dioxidodecahydrodifuro[3,2-d:3′,2′-j][1,3,7,9,2,8]tetra-oxadiphosphacyclododecin-2-yl)-9H-purin-6-yl)-1-(3-(2,5-dioxo-2,5-dihydro-1H-pyrrol-1-yl)propanamido)-3,6,9,12-tetraoxapentadecan-15-amide (ATAC20); or N-(9-((2R,3R,3aS,7aR,9R,10R,10aS,14aR)-9-(2-amino-6-oxo-1H-purin-9(6H)-yl)-3,5,10,12-tetrahydroxy-5,12-dioxidodecahydrodifuro[3,2-d:3′,2′-j][1,3,7,9,2,8]tetraoxadiphosphacyclododecin-2-yl)-9H-purin-6-yl)-1-(3-(2,5-dioxo-2,5-dihydro-1H-pyrrol-1-yl)propanamido)-3,6,9,12-tetraoxapentadecan-15-amide (ATAC21).

[0533] An ATAC can be formed by conjugating a cleavable linker containing a valine-alanine or valine-citrulline dipeptide, a PABA group and a maleimide group with an immune-stimulatory compound. For example, an ATAC can be 4-((S)-2-((S)-2-(6-(2,5-dioxo-2,5-dihydro-1H-pyrrol-1-yl)hexanamido)-3-methylbutanamido)propanamido)benzyl ((4-amino-1-(2-hydroxy-2-methyl-propyl)-1H-imidazo[4,5-c]quinolin-2-yl)methyl)(ethyl)carbamate (ATAC22); 4-((S)-2-((S)-2-(6-(2,5-dioxo-2,5-dihydro-1H-pyrrol-1-yl)hexanamido)-3-methyl-butanamido)propanamido)benzyl (5-(2-amino-3-pentylquinolin-5-yl)pentyl)-carbamate (ATAC23); 4-((S)-2-((S)-2-(6-(2,5-dioxo-2,5-dihydro-1H-pyrrol-1-yl)hexanamido)-3-methylbutan-amido)-5-ureidopentanamido)benzyl-(5-(2-amino-3-pentylquinolin-5-yl)pentyl)-carbamate (ATAC24); 4-((S)-2-((S)-2-(6-(2,5-dioxo-2,5-dihydro-1H-pyrrol-1-yl)hexanamido)-3-methylbutanamido)-5-ureidopentanamido)benzyl((4-amino-1-(2-hydroxy-2-methylpropyl)-1H-imidazo[4,5-c]quinolin-2-yl)methyl)(ethyl)carbamate TFA salt (ATAC25); 2-(3-{2-[N-Methyl({p-[(S)-2-{(S)-2-[6-(2,5-dioxo-1H-pyrrol-1-yl)hexanoylamino]-3-methylbutyrylamino}-5-ureidovalerylamino]phenyl}methoxycarbonyl)amino]ethyl}ureido)-7-methyl-1,6-dithia-3,8-diaza-as-indacene (ATAC26); 2-{[(8-Hydroxy-7-quinolyl)(p-trifluoromethoxyphenyl)methyl]({p-[(S)-2-{(S)-2-[6-(2,5-dioxo-1H-pyrrol-1-yl)hexanoylamino]-3-methylbutyrylamino}-5-ureidovalerylamino]phenyl}methoxycarbonyl)amino}-1,3-benzothiazole (ATAC27); (1R,6R,8R,9S,10S,15R,17R,18S)-18-({p-[(S)-2-{(S)-2-[6-(2,5-Dioxo-1H-pyrrol-1-yl)hexanoylamino]-3-methylbutyrylamino}-5-ureidovalerylamino]phenyl}methoxycarbonylamino)-8,17-bis(2-amino-6-oxo-1,9-dihydropurin-9-yl)-3,12-dihydroxy-9-hydroxy-2.4.7.11.13.16-hexaoxa-3λ5.12λ5-diphosphatricyclo[13.3.0.06,10]octadecane-3,12-dione (ATAC28); (1R,6R,8R,9S,10S,15R,17R,18S)-18-({p-[(S)-2-{(S)-2-[6-(2,5-Dioxo-1H-pyrrol-1-yl)hexanoylamino]-3-methylbutyrylamino}propionylamino]phenyl}methoxycarbonylamino)-8,17-bis(2-amino-6-oxo-1,9-dihydropurin-9-yl)-3,12-dihydroxy-9-hydroxy-2.4.7.11.13.16-hexaoxa-3λ5.12λ5-diphosphatricyclo[13.3.0.06,10]octadecane-3,12-dione (ATAC29); (1R,6R,8R,9S,10S,15R,17R,18S)-18-({p-[(S)-2-{(S)-2-[6-(2,5-Dioxo-1H-pyrrol-1-yl)hexanoylamino]-3-methylbutyrylamino}-5-ureidovalerylamino]phenyl}methoxycarbonylamino)-8,17-bis(2-amino-6-oxo-1,9-dihydropurin-9-yl)-9-hydroxy-3,12-dimercapto-2.4.7.11.13.16-hexaoxa-3λ5.12λ5-diphosphatricyclo[13.3.0.06,10]octadecane-3,12-dione (ATAC30); {p-[(S)-2-{(S)-2-[6-(2,5-Dioxo-1H-pyrrol-1-yl)hexanoylamino]-3-methylbutyrylamino}-5-ureidovalerylamino]phenyl}methyl 9-{(1S,6R,8R,9S,10S,15R,17R,18S)-8-(2-amino-6-oxo-1,9-dihydropurin-9-yl)-3,12-dihydroxy-9,18-dihydroxy-3,12-dioxo-2.4.7.11.13.16-hexaoxa-3λ5.12λ5-diphosphatricyclo[13.2.1.06,10]octadec-17-yl}-9a-adenineecarboxylate (ATAC31; 1-{6-[({7-Amino-3-(2-hydroxy-2-methylpropyl)-3.5.8-triazatricyclo[7.4.0.02,6]trideca-1(9),2(6),4,7,10,12-hexaen-4-yl}methyl)-N-ethylamino]-6-oxohexyl}-1H-pyrrole-2,5-dione (ATAC32); 1-{[4-({6-[({7-Amino-3-(2-hydroxy-2-methylpropyl)-3.5.8-triazatricyclo[7.4.0.02,6]trideca-1(9),2(6),4,7,10,12-hexaen-4-yl}methyl)-N-ethylamino]-6-oxohexylamino}carbonyl)cyclohexyl]methyl}-1H-pyrrole-2,5-dione (ATAC33); or 1-[(4-{[({7-Amino-3-(2-hydroxy-2-methylpropyl)-3.5.8-triazatricyclo[7.4.0.02,6]trideca-1(9),2(6),4,7,10,12-hexaen-4-yl}methyl)-N-ethylamino]-carbonyl}cyclohexyl)methyl]-1H-pyrrole-2,5-dione (ATAC34).

[0534] An ATAC can be formed by conjugating a noncleavable maleimide-PEG4 linker containing an activated ester such as a pentafluorophenyl group or an N-hydroxysuccinimide group with an immune-stimulatory compound. For example, an ATAC can be pentafluorophenyl 25-(2-amino-3-pentylquinolin-5-yl)-19-oxo-4,7,10,13,16-pentaoxa-20-azapentacosanoate (ATAC1); perfluorophenyl 3-((4-amino-1-(2-hydroxy-2-methylpropyl)-1H-imidazo[4,5-c]quinolin-2-yl)methyl)-4-oxo-7,10,13,16,19-pentaoxa-3-azadocosan-22-oate (ATAC2); pentafluorophenyl 25-(2-amino-3-pentylquinolin-5-yl)-19-oxo-4,7,10,13,16-pentaoxa-20-azapentacosanoate (ATAC3); or 2,5-Dioxopyrrolidin-1-yl 3-((4-amino-1-(2-hydroxy-2-methylpropyl)-1H-imidazo-[4,5-c]quinolin-2-yl)methyl)-4-oxo-7,10,13,16,19-pentaoxa-3-azadocosan-22-oate (ATAC4).

[0535] An ATAC can be formed by conjugating a cleavable linker containing a valine-alanine or valine-citrulline dipeptide, a PABA group and an activated ester such as a pentafluorophenyl group or an N-hydroxysuccinimde group to an immune-stimulatory compound. For example, an ATAC can be 2,5-dioxopyrrolidin-1-yl 6-(((S)-1-(((S)-1-((4-((((5-(2-amino-3-pentylquinolin-5-yl)pentyl)carbamoyl)oxy)methyl)phenyl)amino)-1-oxopropan-2-yl)amino)-3-methyl-1-oxobutan-2-yl)amino)-6-oxohexanoate (ATAC5); 2,5-dioxopyrrolidin-1-yl 7-(((S)-1-(((S)-1-((4-(((((4-amino-1-(2-hydroxy-2-methylpropyl)-1H-imidazo[4,5-c]quinolin-2-yl)methyl)(ethyl)carbamoyl)oxy)methyl)phenyl)amino)-1-oxopropan-2-yl)amino)-3-methyl-1-oxobutan-2-yl)amino)-7-oxoheptanoate (ATAC6); 2,5-dioxopyrrolidin-1-yl 7-(((S)-1-(((S)-1-((4-(((((4-amino-1-(2-hydroxy-2-methylpropyl)-1H-imidazo[4,5-c]quinolin-2-yl)methyl)(ethyl)carbamoyl)oxy)methyl)phenyl)amino)-1-oxo-5-ureidopentan-2-yl)amino)-3-methyl-1-oxobutan-2-yl)amino)-7-oxoheptanoate (ATAC7); perfluorophenyl 6-(((S)-1-(((S)-1-((4-((((5-(2-amino-3-pentylquinolin-5-yl)pentyl)carbamoyl)oxy)methyl)phenyl)amino)-1-oxopropan-2-yl)amino)-3-methyl-1-oxobutan-2-yl)amino)-6-oxohexanoate (ATAC8); perfluorophenyl 7-(((S)-1-(((S)-1-((4-(((((4-amino-1-(2-hydroxy-2-methylpropyl)-1H-imidazo[4,5-c]quinolin-2-yl)methyl)(ethyl)carbamoyl)oxy)methyl)phenyl)amino)-1-oxopropan-2-yl)amino)-3-methyl-1-oxobutan-2-yl)amino)-7-oxoheptanoate (ATAC9); or perfluorophenyl 7-(((S)-1-(((S)-1-((4-(((((4-amino-1-(2-hydroxy-2-methylpropyl)-1H-imidazo[4,5-c]quinolin-2-yl)methyl)(ethyl)carbamoyl)oxy)methyl)phenyl)amino)-1-oxo-5-ureidopentan-2-yl)amino)-3-methyl-1-oxobutan-2-yl)amino)-7-oxoheptanoate (ATAC10).

[0536] An antibody construct of a conjugate can comprise an anti-CD40 antibody. An anti-CD40 antibody can comprise two SBT-040-G1WT heavy chains and two light chains from a SBT-040 antibody, which can be referred to as SBT-040-WT. An anti-CD40 antibody can comprise two SBT-040-G1VLPLL heavy chains and two light chains from a SBT-040 antibody, which can be referred to as SBT-040-VLPLL. An anti-CD40 antibody can comprise two SBT-040-G1DE heavy chains and two light chains from a SBT-040 antibody, which can be referred to as SBT-040-DE. An anti-CD40 antibody can comprise two SBT-040-G1AAA heavy chains and two light chains from a SBT-040 antibody, which can be referred to as SBT-040-AAA. An anti-CD40 antibody can comprise two IgG2 heavy chains and two light chains from a SBT-040 antibody, which can be referred to as SBT-040-G2.

[0537] A conjugate can comprise SBT-040-WT-ATAC1. A conjugate can comprise SBT-040-WT-ATAC2. A conjugate can comprise SBT-040-WT-ATAC3. A conjugate can comprise SBT-040-WT-ATAC4. A conjugate can comprise SBT-040-WT-ATAC5. A conjugate can comprise SBT-040-WT-ATAC6. A conjugate can comprise SBT-040-WT-ATAC7. A conjugate can comprise SBT-040-WT-ATAC8. A conjugate can comprise SBT-040-WT-ATAC9. A conjugate can comprise SBT-040-WT-ATAC10. A conjugate can comprise SBT-040-WT-ATAC11. A conjugate can comprise SBT-040-WT-ATAC12. A conjugate can comprise SBT-040-WT-ATAC13. A conjugate can comprise SBT-040-WT-ATAC14. A conjugate can comprise SBT-040-WT-ATAC15. A conjugate can comprise SBT-040-WT-ATAC16. A conjugate can comprise SBT-040-WT-ATAC17. A conjugate can comprise SBT-040-WT-ATAC18. A conjugate can comprise SBT-040-WT-ATAC19. A conjugate can comprise SBT-040-WT-ATAC20. A conjugate can comprise SBT-040-WT-ATAC21. A conjugate can comprise SBT-040-WT-ATAC22. A conjugate can comprise SBT-040-WT-ATAC23. A conjugate can comprise SBT-040-WT-ATAC24. A conjugate can comprise SBT-040-WT-ATAC25. A conjugate can comprise SBT-040-WT-ATAC26. A conjugate can comprise SBT-040-WT-ATAC27. A conjugate can comprise SBT-040-WT-ATAC28. A conjugate can comprise SBT-040-WT-ATAC29. A conjugate can comprise SBT-040-WT-ATAC30. A conjugate can comprise SBT-040-WT-ATAC31. A conjugate can comprise SBT-040-WT-ATAC32. A conjugate can comprise SBT-040-WT-ATAC33. A conjugate can comprise SBT-040-WT-ATAC34. A conjugate can comprise SBT-040-VLPLL-ATAC1. A conjugate can comprise SBT-040-VLPLL-ATAC2. A conjugate can comprise SBT-040-VLPLL-ATAC3. A conjugate can comprise SBT-040-VLPLL-ATAC4. A conjugate can comprise SBT-040-VLPLL-ATAC5. A conjugate can comprise SBT-040-VLPLL-ATAC6. A conjugate can comprise SBT-040-VLPLL-ATAC7. A conjugate can comprise SBT-040-VLPLL-ATAC8. A conjugate can comprise SBT-040-VLPLL-ATAC9. A conjugate can comprise SBT-040-VLPLL-ATAC10. A conjugate can comprise SBT-040-VLPLL-ATAC11. A conjugate can comprise SBT-040-VLPLL-ATAC12. A conjugate can comprise SBT-040-VLPLL-ATAC13. A conjugate can comprise SBT-040-VLPLL-ATAC14. A conjugate can comprise SBT-040-VLPLL-ATAC15. A conjugate can comprise SBT-040-VLPLL-ATAC16. A conjugate can comprise SBT-040-VLPLL-ATAC17. A conjugate can comprise SBT-040-VLPLL-ATAC18. A conjugate can comprise SBT-040-VLPLL-ATAC19. A conjugate can comprise SBT-040-VLPLL-ATAC20. A conjugate can comprise SBT-040-VLPLL-ATAC21. A conjugate can comprise SBT-040-VLPLL-ATAC22. A conjugate can comprise SBT-040-VLPLL-ATAC23. A conjugate can comprise SBT-040-VLPLL-ATAC24. A conjugate can comprise SBT-040-VLPLL-ATAC25. A conjugate can comprise SBT-040-VLPLL-ATAC26. A conjugate can comprise SBT-040-VLPLL-ATAC27. A conjugate can comprise SBT-040-VLPLL-ATAC28. A conjugate can comprise SBT-040-VLPLL-ATAC29. A conjugate can comprise SBT-040-VLPLL-ATAC30. A conjugate can comprise SBT-040-VLPLL-ATAC31. A conjugate can comprise SBT-040-VLPLL-ATAC32. A conjugate can comprise SBT-040-VLPLL-ATAC33. A conjugate can comprise SBT-040-VLPLL-ATAC34. A conjugate can comprise SBT-040-VLPLL-ATAC34. A conjugate can comprise SBT-040-DE-ATAC1. A conjugate can comprise SBT-040-DE-ATAC2. A conjugate can comprise SBT-040-DE-ATAC3. A conjugate can comprise SBT-040-DE-ATAC4. A conjugate can comprise SBT-040-DE-ATAC5. A conjugate can comprise SBT-040-DE-ATAC6. A conjugate can comprise SBT-040-DE-ATAC7. A conjugate can comprise SBT-040-DE-ATAC8. A conjugate can comprise SBT-040-DE-ATAC9. A conjugate can comprise SBT-040-DE-ATAC10. A conjugate can comprise SBT-040-DE-ATAC11. A conjugate can comprise SBT-040-DE-ATAC12. A conjugate can comprise SBT-040-DE-ATAC13. A conjugate can comprise SBT-040-DE-ATAC14. A conjugate can comprise SBT-040-DE-ATAC15. A conjugate can comprise SBT-040-DE-ATAC16. A conjugate can comprise SBT-040-DE-ATAC17. A conjugate can comprise SBT-040-DE-ATAC18. A conjugate can comprise SBT-040-DE-ATAC19. A conjugate can comprise SBT-040-DE-ATAC20. A conjugate can comprise SBT-040-DE-ATAC21. A conjugate can comprise SBT-040-DE-ATAC22. A conjugate can comprise SBT-040-DE-ATAC23. A conjugate can comprise SBT-040-DE-ATAC24. A conjugate can comprise SBT-040-DE-ATAC25. A conjugate can comprise SBT-040-DE-ATAC26. A conjugate can comprise SBT-040-DE-ATAC27. A conjugate can comprise SBT-040-DE-ATAC28. A conjugate can comprise SBT-040-DE-ATAC29. A conjugate can comprise SBT-040-DE-ATAC30. A conjugate can comprise SBT-040-DE-ATAC31. A conjugate can comprise SBT-040-DE-ATAC32. A conjugate can comprise SBT-040-DE-ATAC33. A conjugate can comprise SBT-040-DE-ATAC34. A conjugate can comprise SBT-040-AAA-ATAC1. A conjugate can comprise SBT-040-AAA-ATAC2. A conjugate can comprise SBT-040-AAA-ATAC3. A conjugate can comprise SBT-040-AAA-ATAC4. A conjugate can comprise SBT-040-AAA-ATAC5. A conjugate can comprise SBT-040-AAA-ATAC6. A conjugate can comprise SBT-040-AAA-ATAC7. A conjugate can comprise SBT-040-AAA-ATAC8. A conjugate can comprise SBT-040-AAA-ATAC9. A conjugate can comprise SBT-040-AAA-ATAC10. A conjugate can comprise SBT-040-AAA-ATAC11. A conjugate can comprise SBT-040-AAA-ATAC12. A conjugate can comprise SBT-040-AAA-ATAC13. A conjugate can comprise SBT-040-AAA-ATAC14. A conjugate can comprise SBT-040-AAA-ATAC15. A conjugate can comprise SBT-040-AAA-ATAC16. A conjugate can comprise SBT-040-AAA-ATAC17. A conjugate can comprise SBT-040-AAA-ATAC18. A conjugate can comprise SBT-040-AAA-ATAC19. A conjugate can comprise SBT-040-AAA-ATAC20. A conjugate can comprise SBT-040-AAA-ATAC21. A conjugate can comprise SBT-040-AAA-ATAC22. A conjugate can comprise SBT-040-AAA-ATAC23. A conjugate can comprise SBT-040-AAA-ATAC24. A conjugate can comprise SBT-040-AAA-ATAC25. A conjugate can comprise SBT-040-AAA-ATAC26. A conjugate can comprise SBT-040-AAA-ATAC27. A conjugate can comprise SBT-040-AAA-ATAC28. A conjugate can comprise SBT-040-AAA-ATAC29. A conjugate can comprise SBT-040-AAA-ATAC30. A conjugate can comprise SBT-040-AAA-ATAC31. A conjugate can comprise SBT-040-AAA-ATAC32. A conjugate can comprise SBT-040-AAA-ATAC33. A conjugate can comprise SBT-040-AAA-ATAC34. The Kd for binding of the CD40 binding domain of any of these conjugates to CD40 can be about 2 times, about 3 times, about 4 times, about 5 times, about 6 times, about 7 times, about 8 times, about 9 times, about 10 times, about 15 times, about 20 times, about 25 times, about 30 times, about 35 times, about 40 times, about 45 times, about 50 times, about 60 times, about 70 times, about 80 times, about 90 times, about 100 times, about 110 times, or about 120 times greater than the Kd for binding of the CD40 binding domain to CD40 in the absence of the immune-stimulatory compound or ATAC. The Kd for binding of the CD40 binding domain of any of these conjugates to CD40 can be less than 10 nM. The Kd for binding of the CD40 binding domain of any of the conjugates to CD40 can be less than 100 nM, less than 50 nM, less than 20 nM, less than 5 nM, less than 1 nM, or less than 0.1 nM. The Kd for binding of the Fc domain of any of the conjugates to an Fc receptor can be about 2 times, about 3 times, about 4 times, about 5 times, about 6 times, about 7 times, about 8 times, about 9 times, about 10 times, about 15 times, about 20 times, about 25 times, about 30 times, about 35 times, about 40 times, about 45 times, about 50 times, about 60 times, about 70 times, about 80 times, about 90 times, about 100 times, about 110 times, or about 120 times greater than the Kd for binding of the Fc domain to the Fc receptor in the absence of the immune-stimulatory compound or ATAC. The Kd for binding of the Fc domain of any of the conjugates to an Fc receptor can be less than 10 nM. The Kd for binding of the Fc domain of any of the conjugates to an Fc receptor can be less than 100 nM, less than 50 nM, less than 20 nM, less than 5 nM, less than 1 nM, or less than 0.1 nM.

[0538] In a conjugate, an antibody can be linked to an immune-stimulatory compound in such a way that the antibody can still bind to an antigen and the Fc domain of the antibody can still bind to an FcR or FcR-mediated signaling resulting from the Fc domain of the antibody from binding to an FcR. In a conjugate, an antibody construct is linked to an immune-stimulatory compound in such a way that the linking does not interfere with ability of the antigen binding domain of the antibody construct to bind to antigen, the ability of the Fc domain of the antibody construct to bind to an FcR, or FcR-mediated signaling resulting from the Fc domain of the antibody construct from binding to an FcR. In a conjugate, an immune-stimulatory compound can be linked to an antibody construct in such a way the linking does not interfere with the ability of the immune-stimulatory compound to bind to its receptor. A conjugate can produce stronger immune stimulation and a greater therapeutic window than components of the conjugate alone. In an anti-CD40 antibody linked to a TLR agonist conjugate, the combination of CD40 agonism, TLR agonism, and an accessible Fc domain of the anti-CD40 antibody to allow FcR-mediated signaling can produce stronger immune stimulation and a greater therapeutic window than the CD40 agonism, TLR agonism, or the FcR-mediated signaling alone.

[0539] In some embodiments, the recombinant bispecific antibody further comprises an immune stimulatory compound and a linker, wherein the linker links the immune-stimulatory compound to the Fc comprising domain.

[0540] In some aspects, a method of making a conjugate comprises linking an antibody construct as described herein to an immune stimulatory compound by a linker.

### Synthesis of Immune-Stimulatory Compounds

[0541] An immune stimulatory compound can be synthesized as shown in Scheme A1.

[chemical structure]

[chemical structure]

[0542] Synthesis of the C-2′ amino cyclic dinucleotide (viii) can be accomplished using a multistep synthesis as outlined in scheme A1 above.

### Synthesis of Exemplary ATAC Compounds

[0543] An ATAC compound can be synthesized by various methods. For example, ATAC compounds, such as ATAC1-ATAC4, can be synthesized as shown in Scheme B1.

[chemical structure]

[0544] A PEGylated carboxylic acid (i) that has been activated for amide bond formation can be reacted with an appropriately substituted amine containing immune-stimulatory compound to afford an intermediate amide. Formation of an activated ester (ii) can be achieved by reaction the intermediate amide-containing carboxylic using a reagent such as N-hydroxysuccinimide or pentafluorophenol in the presence of a coupling agent such as diisopropylcarbodiimide (DIC) to provide compounds (ii).

[0545] An ATAC compound can be synthesized by various methods. For example, ATAC compounds, such as ATAC5-ATAC10, can be synthesized as shown in Scheme B2.

[chemical structure]

[0546] An activated carbonate such as (i) can be reacted with an appropriately substituted amine containing immune-stimulatory compound to afford carbamates (ii) which can be deprotected using standard methods based on the nature of the R₃ ester group. The resulting carboxylic acid (iii) can then by coupled with an activating agent such as N-hydroxysuccinimide or pentafluorophenol to provide compounds (iv).

[0547] An ATAC compound can be synthesized by various methods. For example, ATAC compounds, such as ATAC11-ATAC21, can be synthesized as shown in Scheme B3.

[chemical structure]

[0548] An activated carboxylic ester such as (i-a) can be reacted with an appropriately substituted amine containing immune-stimulatory compound to afford amides (ii). Alternatively, carboxylic acids of type (i-b) can be coupled to an appropriately substituted amine containing immune-stimulatory compound in the presence of an amide bond forming agent such as dicyclohexycarbodiimde (DCC) to provide the desired ATAC compounds.

[0549] An ATAC compound can be synthesized by various methods. For example, ATAC compounds, such as ATAC22-ATAC31, can be synthesized as shown in Scheme B4.

[chemical structure]

[0550] An activated carbonate such as (i) can be reacted with an appropriately substituted amine containing immune-stimulatory compound to afford carbamates (ii) as the target ATAC compounds.

[0551] An ATAC compound can be synthesized by various methods. For example, ATAC compounds, such as ATAC32-ATAC34, can be synthesized as shown in Scheme B5.

[chemical structure]

[0552] An activated carboxylic acid such as (i-a, i-b, i-c) can be reacted with an appropriately substituted amine containing immune-stimulatory compound to afford amides (ii-a, ii-b, ii-c) as the target ATAC compounds.

### Synthesis of Exemplary TLR8 Agonist Compounds

[0553] The following synthetic schemes are provided for purposes of illustration, not limitation. The following examples illustrate the various methods of making compounds described herein. It is understood that one skilled in the art may be able to make these compounds by similar methods or by combining other methods known to one skilled in the art. It is also understood that one skilled in the art would be able to make, in a similar manner as described below by using the appropriate starting materials and modifying the synthetic route as needed. In general, starting materials and reagents can be obtained from commercial vendors or synthesized according to sources known to those skilled in the art or prepared as described herein.

[chemical structure]

[chemical structure]

[0554] React an aldehyde (i) with an appropriately Wittig reagent, such as tert-butyl 3-cyano-2-(triphenylphosphorylidene)propanoate, at elevated temperatures to afford an olefin (ii), which undergoes reductive cyclization by treating the olefin (ii) with a reducing agent, such as iron powder in hot acetic acid, to afford azepines (iii). Deprotect the C-4 ester group by using a strong acid such as HCl to give compounds (iv), which is in turn coupled with a substituted amine using a coupling agent, such as BOP reagent. Protect the 2-amino substituent of compounds (v) with a tert-butoxycarbonyl group. Hydrolyze the resulting compounds (vi) with reagents such as LiOH in a mixture of THF and methanol to afford compounds (vii). Convert the C-8 carboxylic acid of (vii) to the amide group using known reagents such as HBTU and a tertiary amine base. Acid-mediated deprotection of compounds (viii) using a reagent such as TFA in dichloromethane provides the target compounds (ix).

[chemical structure]

[0555] React (i) under standard conditions used for the carbonylation of aryl halides such as carbon monoxide, a palladium catalyst such as Pd(OAc)₂ and a ligand such as 4,5-bis(diphenylphosphino)-9,9-dimethylxanthene (XantPhos) and a base such as potassium phosphate in a mixture of THF and water to provide carboxylic acids (ii). Conversion to final products can then be carried out in a manner similar to that described in Scheme 1 (vii→ix).

[chemical structure]

[0556] React an aldehyde (i) with an appropriately Wittig reagent, such as ethyl 3-cyano-2-(triphenylphosphorylidene)propanoate, at ambient temperature to afford an olefin (ii), which undergoes reductive cyclization by treating the olefin (ii) with a reducing agent, such as iron powder in hot acetic acid, to afford azepines (iii). Protect the C-2 amine group by using Boc anhydride to give compounds (iii), which is in turn saponified with an alkaline metal hydroxide such as LiOH to afford the carboxylic acid which is coupled with a substituted amine using a coupling agent, such as BOP reagent to provide compounds (iv). Convert the C-8 carboxylic acid of (v) to the amide group using known reagents such as EDCI/HOBT and a tertiary amine base. Halogen-amine exchange can be effected using standard methodology such as copper-mediated or palladium-catalyzed couplings (benzophenone imine/Pd(II)) to provide C-8 anilines (vi). Functionalization of amines (vi) by acylation or sulfonylation provides anilides (X═C) or sulfonamides (X═SO) compounds (vii). Alternatively, compounds (vii) can be prepared directly through a palladium-mediated coupling of bromide (v) and an appropriately substituted amide or sulfonamide. Acid-mediated deprotection of compounds (vii) using a reagent such as TFA in dichloromethane provides the target compounds (viii).

[chemical structure]

[0557] React (i) with benzyl thiol in the presence of a palladium catalyst such as Pd₂(dba)₃ and a ligand such as XantPhos at elevated temperatures to provide C-8 sulfides (ii). Oxidative chlorination of sulfides (ii) with a reagent such as 1,3-dichloro-5,5-dimethylhydantoin (DCDMH) affords intermediate sulfonyl chlorides which can be reacted with an appropriately substituted amine of structure R′″NH₂ to provides sulfonamides (iii). Acid-mediated deprotection of compounds (iii) using a reagent such as TFA in dichloromethane provides the target compounds (iv).

[0558] These conjugates can be made by various methods. It is understood that one skilled in the art may be able to make these compounds by similar methods or by combining other methods known to one skilled in the art. It is also understood that one skilled in the art would be able to make, in a similar manner as described herein by using the appropriate starting materials and modifying the synthetic route as needed. Starting materials and reagents can be obtained from commercial vendors or synthesized according to sources known to those skilled in the art or prepared as described herein.

[0559] In some aspects, a conjugate comprises: a) an antibody construct comprising: i) first binding domain, wherein the first binding domain specifically binds to a tumor antigen; ii) a second binding domain, wherein the second binding domain specifically binds to an antigen on an antigen presenting cell, wherein the antigen is a molecule on the antigen presenting cell; and iii) an Fc domain; b) an immune-stimulatory compound; and c) a linker attaching the antibody construct to the immune-stimulatory compound, wherein the linker is covalently bound to the antibody construct and the linker is covalently bound to the immune-stimulatory compound, and wherein a molar ratio of immune-stimulatory compound to antibody construct is less than 8; wherein the first binding domain is attached to the Fc domain and the second binding domain is attached to the Fc domain or to a C-terminal end of a light chain of the first binding domain; wherein a K_{d} for binding of the Fc domain to an Fc receptor in a presence of the first binding domain and the second binding domain is no greater than about 100 times a K_{d} for binding of the Fc domain to the Fc receptor in an absence of the second binding domain; and wherein immune cell activation caused by the conjugate when bound to the tumor antigen as measured by a cytokine release assay is greater than immune cell activation in the absence of binding to the tumor antigen.

[0560] In some aspects, a conjugate comprises: a) an antibody construct comprising: i) first binding domain, wherein the first binding domain specifically binds to a tumor antigen; ii) a second binding domain, wherein the second binding domain specifically binds to an antigen on an antigen presenting cell, wherein the antigen is a molecule on the antigen presenting cell; and iii) an Fc domain; b) an immune-stimulatory compound; and c) a linker attaching the antibody construct to the immune-stimulatory compound, wherein the linker is covalently bound to the antibody construct and the linker is covalently bound to the immune-stimulatory compound, and wherein a molar ratio of immune-stimulatory compound to antibody construct is less than 8; wherein the first binding domain is attached to the Fc domain and the second binding domain is attached to the Fc domain or to a C-terminal end of a light chain of the first binding domain; wherein a K_{d} for binding of the Fc domain to an Fc receptor in a presence of the first binding domain and the second binding domain is no greater than about 100 times a K_{d} for binding of the Fc domain to the Fc receptor in an absence of the second binding domain; and wherein antigen presenting cells are conditionally activated when the conjugate is bound to the tumor antigen as measured by a cytokine release assay.

[0561] In some aspects, a conjugate for use in inducing immune cell activation comprising: a) an antibody construct comprising: i) first binding domain, wherein the first binding domain specifically binds to a tumor antigen; ii) a second binding domain, wherein the second binding domain specifically binds to an antigen on an antigen presenting cell, wherein the antigen is a molecule on the antigen presenting cell; and iii) an Fc domain; b) an immune-stimulatory compound; and c) a linker attaching the antibody construct to the immune-stimulatory compound, wherein the linker is covalently bound to the antibody construct and the linker is covalently bound to the immune-stimulatory compound, and wherein a molar ratio of immune-stimulatory compound to antibody construct is less than 8; wherein the first binding domain is attached to the Fc domain and the second binding domain is attached to the Fc domain or to a C-terminal end of a light chain of the first binding domain; wherein a K_{d} for binding of the Fc domain to an Fc receptor in a presence of the first binding domain and the second binding domain is no greater than about 100 times a K_{d} for binding of the Fc domain to the Fc receptor in an absence of the second binding domain; and wherein immune cell activation caused by the conjugate when bound to the tumor antigen as measured by a cytokine release assay is greater than immune cell activation in the absence of binding to the tumor antigen.

[0562] In some aspects, a conjugate for use in conditionally activating an antigen presenting cell comprising: a) an antibody construct comprising: i) first binding domain, wherein the first binding domain specifically binds to a tumor antigen; ii) a second binding domain, wherein the second binding domain specifically binds to an antigen on the antigen presenting cell, and iii) an Fc domain; b) an immune-stimulatory compound; and c) a linker attaching the antibody construct to the immune-stimulatory compound, wherein the linker is covalently bound to the antibody construct and the linker is covalently bound to the immune-stimulatory compound, and wherein a molar ratio of immune-stimulatory compound to antibody construct is less than 8; wherein the first binding domain is attached to the Fc domain and the second binding domain is attached to the Fc domain or to a C-terminal end of a light chain of the first binding domain; wherein a K_{d} for binding of the Fc domain to an Fc receptor in a presence of the first binding domain and the second binding domain is no greater than about 100 times a K_{d} for binding of the Fc domain to the Fc receptor in an absence of the second binding domain; and wherein antigen presenting cells are conditionally activated when the conjugate is bound to the tumor antigen as measured cytokine release assay.

[0563] In some aspects, a conjugate comprises: a) an immune-stimulatory compound; b) an antibody construct comprising a first binding domain and an Fc domain, wherein the first binding domain specifically binds to an antigen expressed on a cell, wherein the amino acid sequence of the antigen has at least 80% homology to the amino acid sequence of an antigen selected from a group consisting of Endoglin, CD204, CD206, CD301, VTCN1, VISTA, GLP-3, CLDN6, CLDN16, UPK1B, STRA6, TMPRSS3, TMPRSS4, TMEM238, C1orf186, LRRC15, DEC-205, CD36 mannose scavenger receptor 1, CLEC9A, DC-SIGN, CLEC12A, BDCA-2, 41BBL, MARCO, CLEC5A, Dectin 1, Dectin 2, CD64, CD32A, CD16A, HVEM, and CD32B, and a fragment thereof; and c) a linker attaching the antibody construct to the immune-stimulatory compound, wherein the linker is covalently bound to the antibody construct and the linker is covalently bound to the immune-stimulatory compound, and wherein a molar ratio of immune-stimulatory compound to antibody construct is less than 8.

[0564] In some aspects, a conjugate comprises: a) an immune-stimulatory compound; b) an antibody construct comprising a first binding domain and an Fc domain, wherein: i) the first binding domain specifically binds to an antigen, wherein the amino acid sequence of the antigen has at least 80% homology to the amino acid sequence of an antigen selected from a group consisting of endoglin, PD-L1, CD204, CD206, CD301, VTCN1, VISTA, GLP-3, CLDN6, CLDN16, UPK1B, STRA6, TMPRSS3, TMPRSS4, TMEM238, C1orf186, LRRC15, DEC-205, CD36 mannose scavenger receptor 1, CLEC9A, DC-SIGN, CLEC12A, BDCA-2, OX40L, 41BBL, MARCO, CLEC5A, Dectin 1, Dectin 2, CD64, CD32A, CD16A, HVEM, CD32B, and CD47, and a fragment thereof, ii) a K_{d} for binding of the first binding domain to the antigen in a presence of the immune-stimulatory compound is less than about 100 nM and no greater than about 100 times a K_{d} for binding of the first binding domain to the antigen in the absence of the immune-stimulatory compound, and iii) a K_{d} for binding of the Fc domain to an Fc receptor in the presence of the immune-stimulatory compound is no greater than about 100 times a K_{d} for binding of the Fc domain to the Fc receptor in the absence of the immune-stimulatory compound; and c) a linker attaching the antibody construct to the immune-stimulatory compound, wherein the linker is covalently bound to the antibody construct and the linker is covalently bound to the immune-stimulatory compound, and wherein a molar ratio of immune-stimulatory compound to antibody construct is less than 8.

[0565] In some aspects, a conjugate comprises: a) an immune-stimulatory compound; b) an antibody construct comprising a first binding domain and an Fc domain, wherein: i) the first binding domain comprises a variable region comprising a set of CDR sequences that comprises at least 80% sequence identity to a set of variable region CDR sequences set forth in TABLE 3 or TABLE 11; ii) a K_{d} for binding of the first binding domain to the antigen in a presence of the immune-stimulatory compound is less than about 100 nM and no greater than about 100 times a K_{d} for binding of the first binding domain to the antigen in the absence of the immune-stimulatory compound, and iii) a K_{d} for binding of the Fc domain to an Fc receptor in the presence of the immune-stimulatory compound is no greater than about 100 times a K_{d} for binding of the Fc domain to the Fc receptor in the absence of the immune stimulatory compound; and c) a linker attaching the antibody construct to the immune-stimulatory compound, wherein the linker is covalently bound to the antibody construct and the linker is covalently bound to the immune-stimulatory compound, and wherein a molar ratio of immune-stimulatory compound to antibody construct is less than 8.

[0566] In some aspects, a conjugate for use in activating an immune cell comprises: a) an immune-stimulatory compound; b) an antibody construct comprising a first binding domain and an Fc domain, wherein the first binding domain specifically binds to an antigen expressed on a cell, wherein the amino acid sequence of the antigen has at least 80% homology to the amino acid sequence of an antigen selected from a group consisting of Endoglin, CD204, CD206, CD301, VTCN1, VISTA, GLP-3, CLDN6, CLDN16, UPK1B, STRA6, TMPRSS3, TMPRSS4, TMEM238, C1orf186, LRRC15, DEC-205, CD36 mannose scavenger receptor 1, CLEC9A, DC-SIGN, CLEC12A, BDCA-2, 41BBL, MARCO, CLEC5A, Dectin 1, Dectin 2, CD64, CD32A, CD16A, HVEM, and CD32B, and a fragment thereof; and c) a linker attaching the antibody construct to the immune-stimulatory compound, wherein the linker is covalently bound to the antibody construct and the linker is covalently bound to the immune-stimulatory compound, and wherein a molar ratio of immune-stimulatory compound to antibody construct is less than 8; and wherein immune cell activation caused by the conjugate when bound to the tumor antigen as measured by a cytokine release assay is greater than immune cell activation is greater than immune cell activation in the absence of binding to the tumor antigen.

[0567] In some aspects, a conjugate for use in activating an immune cell comprises: a) an immune-stimulatory compound; b) an antibody construct comprising a first binding domain and an Fc domain, wherein: i) the first binding domain specifically binds to an antigen, wherein the amino acid sequence of the antigen has at least 80% homology to the amino acid sequence of an antigen selected from a group consisting of endoglin, PD-L1, CD204, CD206, CD301, VTCN1, VISTA, GLP-3, CLDN6, CLDN16, UPK1B, STRA6, TMPRSS3, TMPRSS4, TMEM238, C1orf186, LRRC15, DEC-205, CD36 mannose scavenger receptor 1, CLEC9A, DC-SIGN, CLEC12A, BDCA-2, OX40L, 41BBL, MARCO, CLEC5A, Dectin 1, Dectin 2, CD64, CD32A, CD16A, HVEM, CD32B, and CD47, and a fragment thereof, ii) a K_{d} for binding of the first binding domain to the antigen in a presence of the immune-stimulatory compound is less than about 100 nM and no greater than about 100 times a K_{d} for binding of the first binding domain to the antigen in the absence of the immune-stimulatory compound, and iii) a K_{d} for binding of the Fc domain to an Fc receptor in the presence of the immune-stimulatory compound is no greater than about 100 times a K_{d} for binding of the Fc domain to the Fc receptor in the absence of the immune-stimulatory compound; and c) a linker attaching the antibody construct to the immune-stimulatory compound, wherein the linker is covalently bound to the antibody construct and the linker is covalently bound to the immune-stimulatory compound, and wherein a molar ratio of immune-stimulatory compound to antibody construct is less than 8; and wherein immune cell activation caused by the conjugate when bound to the tumor antigen as measured by a cytokine release assay is greater than immune cell activation is greater than immune cell activation in the absence of binding to the tumor antigen.

[0568] In some aspects, a conjugate for use in activating an immune cell comprises: a) an immune-stimulatory compound; b) an antibody construct comprising a first binding domain and an Fc domain, wherein the first binding domain comprises a variable region comprising a set of CDR sequences that comprises at least 80% sequence identity to a set of variable region CDR sequences set forth in TABLE 3 or TABLE 11; c) a linker attaching the antibody construct to the immune-stimulatory compound, wherein the linker is covalently bound to the antibody construct and the linker is covalently bound to the immune-stimulatory compound, and wherein a molar ratio of immune-stimulatory compound to antibody construct is less than 8; and wherein immune cell activation caused by the conjugate when bound to the tumor antigen as measured by a cytokine release assay is greater than immune cell activation is greater than immune cell activation in the absence of binding to the tumor antigen.

[0569] In some aspects, a conjugate for use in activating an immune cell comprising: a) an immune-stimulatory compound; b) an antibody construct comprising a first binding domain and an Fc domain, wherein: i) the first binding domain comprises a variable region comprising a set of CDR sequences that comprises at least 80% sequence identity to a set of variable region CDR sequences set forth in TABLE 3 or TABLE 11; ii) a K_{d} for binding of the first binding domain to the antigen in a presence of the immune-stimulatory compound is less than about 100 nM and no greater than about 100 times a K_{d} for binding of the first binding domain to the antigen in the absence of the immune-stimulatory compound, and iii) a K_{d} for binding of the Fc domain to an Fc receptor in the presence of the immune-stimulatory compound is no greater than about 100 times a K_{d} for binding of the Fc domain to the Fc receptor in the absence of the immune stimulatory compound; and c) a linker attaching the antibody construct to the immune-stimulatory compound, wherein the linker is covalently bound to the antibody construct and the linker is covalently bound to the immune-stimulatory compound, and wherein a molar ratio of immune-stimulatory compound to antibody construct is less than 8; and wherein immune cell activation caused by the conjugate when bound to the tumor antigen as measured by a cytokine release assay is greater than immune cell activation is greater than immune cell activation in the absence of binding to the tumor antigen. In some embodiments, the first binding domain comprises a variable region comprising V_{H} and V_{L} sequences at least 80% sequence identity to a pair of V_{H} and V_{L} sequences set forth in TABLE 5 or TABLE 13.

### Pharmaceutical Formulations

[0570] The conjugates, antibody constructs, recombinant bispecific antibodies and methods described herein can be considered useful as pharmaceutical compositions for administration to a subject in need thereof. As used herein the terms “individual,” “subject,” and “patient” are used interchangeably and include humans diagnosed with or suspected of being afflicted with a tumor, a cancer or other neoplasm. As will be appreciated by the skilled artisan, the following description of pharmaceutical formulations of conjugates and antibody constructs is applicable to recombinant bispecific antibodies and conjugates comprising recombinant bispecific antibodies.

[0571] Pharmaceutical compositions can comprise at least the antibody constructs and/or conjugates described herein and one or more pharmaceutically acceptable carriers, diluents, excipients, stabilizers, dispersing agents, suspending agents, and/or thickening agents. The pharmaceutical composition can comprise the antibody construct. The pharmaceutical composition can comprise the conjugate comprising an antibody construct and an immune-stimulatory compound, such as an agonist. The pharmaceutical composition can comprise the conjugate comprising an Fc domain, a binding domain, and an immune-stimulatory compound, such as an agonist. The pharmaceutical composition can comprise any conjugate described herein. The pharmaceutical composition can contain a anti-CD40 antibody. A pharmaceutical composition can comprise an anti-CD40 antibody conjugated to PAMP molecule. A pharmaceutical composition can comprise an anti-CD40 antibody conjugated to a DAMP molecule. A pharmaceutical composition can further comprise buffers, antibiotics, steroids, carbohydrates, drugs (e.g., chemotherapy drugs), radiation, polypeptides, chelators, adjuvants and/or preservatives.

[0572] In a pharmaceutical composition, the conjugates can have an average drug loading. The drug loading, p, is the average number of immune-stimulatory compound-linker molecules per antibody construct, or the number of immune-stimulatory compounds per antibody construct. P can range ranges from 1 to 20, or 1-100. In some conjugates, p is preferably from 1 to 8. The average number of immune-stimulatory compounds per antibody construct in a preparation may be characterized by conventional means such as mass spectroscopy, HIC, ELISA assay, and HPLC.

[0573] Pharmaceutical compositions can be formulated using one or more physiologically-acceptable carriers comprising excipients and auxiliaries. Formulation can be modified depending upon the route of administration chosen. Pharmaceutical compositions comprising a conjugate as described herein can be manufactured, for example, by lyophilizing the conjugate, mixing, dissolving, emulsifying, encapsulating or entrapping the conjugate. Pharmaceutical compositions comprising an antibody construct as described herein can be manufactured, for example, by lyophilizing the antibody construct, mixing, dissolving, emulsifying, encapsulating or entrapping the antibody construct. The pharmaceutical compositions can also include the conjugates or antibody constructs described herein in a free-base form or pharmaceutically-acceptable salt form.

[0574] Methods for formulation of the pharmaceutical compositions can include formulating any of the conjugates or antibody constructs described herein with one or more inert, pharmaceutically-acceptable excipients or carriers to form a solid, semi-solid, or liquid composition. Solid compositions can include, for example, powders, tablets, dispersible granules and capsules, and in some aspects, the solid compositions further contain nontoxic, auxiliary substances, for example wetting or emulsifying agents, pH buffering agents, and other pharmaceutically-acceptable additives. Alternatively, the compositions described herein can be lyophilized or in powder form for re-constitution with a suitable vehicle, e.g., sterile pyrogen-free water, before use

[0575] Pharmaceutical compositions of the conjugates or antibody constructs described herein can comprise at least a conjugate or antibody construct as an active ingredient, respectively. The active ingredients can be entrapped in microcapsules prepared, for example, by coacervation techniques or by interfacial polymerization (e.g., hydroxymethylcellulose or gelatin microcapsules and poly-(methylmethacylate) microcapsules, respectively), in colloidal drug-delivery systems (e.g., liposomes, albumin microspheres, microemulsions, nano-particles and nanocapsules) or in macroemulsions.

[0576] Pharmaceutical compositions as described herein often further can comprise more than one active compound as necessary for the particular indication being treated. The active compounds can have complementary activities that do not adversely affect each other. For example, the pharmaceutical composition can also comprise a chemotherapeutic agent, cytotoxic agent, cytokine, growth-inhibitory agent, anti-hormonal agent, anti-angiogenic agent, and/or cardioprotectant. Such molecules can be present in combination in amounts that are effective for the purpose intended.

[0577] The pharmaceutical compositions and formulations can be sterilized. Sterilization can be accomplished by filtration through sterile filtration.

[0578] The pharmaceutical compositions described herein can be formulated for administration as an injection. Non-limiting examples of formulations for injection can include a sterile suspension, solution or emulsion in oily or aqueous vehicles. Suitable oily vehicles can include, but are not limited to, lipophilic solvents or vehicles such as fatty oils or synthetic fatty acid esters, or liposomes. Aqueous injection suspensions can contain substances which increase the viscosity of the suspension. The suspension can also contain suitable stabilizers. Injections can be formulated for bolus injection or continuous infusion. Alternatively, the pharmaceutical compositions described herein can be lyophilized or in powder form for reconstitution with a suitable vehicle, e.g., sterile pyrogen-free water, before use.

[0579] For parenteral administration, the recombinant antibodies and conjugates can be formulated in a unit dosage injectable form (e.g., use letter solution, suspension, emulsion) in association with a pharmaceutically acceptable parenteral vehicle. Such vehicles can be inherently nontoxic, and non-therapeutic. A vehicle can be water, saline, Ringer's solution, dextrose solution, and 5% human serum albumin. Nonaqueous vehicles such as fixed oils and ethyl oleate can also be used. Liposomes can be used as carriers. The vehicle can contain minor amounts of additives such as substances that enhance isotonicity and chemical stability (e.g., buffers and preservatives).

[0580] Sustained-release preparations can also be prepared. Examples of sustained-release preparations can include semipermeable matrices of solid hydrophobic polymers that can contain the antibody, and these matrices can be in the form of shaped articles (e.g., films or microcapsules). Examples of sustained-release matrices can include polyesters, hydrogels (e.g., poly(2-hydroxyethyl-methacrylate), or poly(vinylalcohol)), polylactides, copolymers of L-glutamic acid and γ ethyl-L-glutamate, non-degradable ethylene-vinyl acetate, degradable lactic acid-glycolic acid copolymers such as the LUPRON DEPO™ (i.e., injectable microspheres composed of lactic acid-glycolic acid copolymer and leuprolide acetate), and poly-D-(−)-3-hydroxybutyric acid.

[0581] Pharmaceutical formulations of the compositions described herein can be prepared for storage by mixing a conjugate or antibody construct with a pharmaceutically acceptable carrier, excipient, and/or a stabilizer. This formulation can be a lyophilized formulation or an aqueous solution. Acceptable carriers, excipients, and/or stabilizers can be nontoxic to recipients at the dosages and concentrations used. Acceptable carriers, excipients, and/or stabilizers can include buffers such as phosphate, citrate, and other organic acids; antioxidants including ascorbic acid and methionine; preservatives, polypeptides; proteins, such as serum albumin or gelatin; hydrophilic polymers; amino acids; monosaccharides, disaccharides, and other carbohydrates including glucose, mannose, or dextrins; chelating agents such as EDTA; sugars such as sucrose, mannitol, trehalose or sorbitol; salt-forming counter-ions such as sodium; metal complexes; and/or non-ionic surfactants or polyethylene glycol.

[0582] In certain embodiments, the recombinant antibodies and conjugates of the current disclosure are administered in or packaged with a pharmaceutically acceptable carrier. The antibodies can be administered suspended in a sterile solution. In certain embodiments, the solution comprises 0.9% NaCl. In certain embodiments, the solution further comprises one or more of: buffers, for example, acetate, citrate, histidine, succinate, phosphate, bicarbonate and hydroxymethylaminomethane (Tris); surfactants, for example, polysorbate 80 (Tween 80), polysorbate 20 (Tween 20), and poloxamer 188; polyol/disaccharide/polysaccharides, for example, glucose, dextrose, mannose, mannitol, sorbitol, sucrose, trehalose, or dextran 40; amino acids, for example, glycine or arginine; antioxidants, for example, ascorbic acid, methionine; and chelating agents, for example, EGTA or EGTA. In certain embodiments, the antibodies and conjugates of the current disclosure are shipped/stored lyophilized and reconstituted before administration. In certain embodiments, lyophilized antibody formulations comprise a bulking agent such as mannitol, sorbitol, sucrose, trehalose, or dextran 40.

### Therapeutic Applications

[0583] The conjugates, antibody constructs, recombinant bispecific antibodies and pharmaceutical compositions thereof, and methods of the present disclosure can be useful for a plurality of different subjects including, but are not limited to, a mammal, human, non-human mammal, a domesticated animal (e.g., laboratory animals, household pets, or livestock), non-domesticated animal (e.g., wildlife), dog, cat, rodent, mouse, hamster, cow, bird, chicken, fish, pig, horse, goat, sheep, rabbit, and any combination thereof. As will be appreciated by the skilled artisan, the following description of therapeutic applications of antibody constructs and conjugates comprising antibody constructs is applicable to recombinant bispecific antibodies and conjugates comprising recombinant bispecific antibodies.

[0584] The conjugates, antibody constructs, pharmaceutical compositions, and methods described herein can be useful as a therapeutic, for example a treatment that can be administered to a subject in need thereof. A therapeutic effect can be obtained in a subject by reduction, suppression, remission, or eradication of a disease state, including, but not limited to, a symptom thereof. A therapeutic effect in a subject having a disease or condition, or pre-disposed to have or is beginning to have the disease or condition, can be obtained by a reduction, a suppression, a prevention, a remission, or an eradication of the condition or disease, or pre-condition or pre-disease state.

[0585] In practicing the methods described herein, therapeutically-effective amounts of the conjugates, antibody constructs, or pharmaceutical compositions described herein can be administered to a subject in need thereof, often for treating and/or preventing a condition or progression thereof. A pharmaceutical composition can affect the physiology of the subject, such as the immune system, inflammatory response, or other physiologic affect. A therapeutically-effective amount can vary widely depending on the severity of the disease, the age and relative health of the subject, the potency of the compounds used, and other factors.

[0586] Treat and/or treating can refer to any indicia of success in the treatment or amelioration of the disease or condition. Treating can include, for example, reducing, delaying or alleviating the severity of one or more symptoms of the disease or condition, or it can include reducing the frequency with which symptoms of a disease, defect, disorder, or adverse condition, and the like, are experienced by a patient. Treat can be used herein to refer to a method that results in some level of treatment or amelioration of the disease or condition, and can contemplate a range of results directed to that end, including but not restricted to prevention of the condition entirely.

[0587] Prevent, preventing and the like can refer to the prevention of the disease or condition, e.g., tumor formation, in the patient. For example, if an individual at risk of developing a tumor or other form of cancer is treated with the methods of the present disclosure and does not later develop the tumor or other form of cancer, then the disease has been prevented, at least over a period of time, in that individual.

[0588] Prevent, preventing and the like also can refer to the prevention of relapse of the disease or condition, e.g., tumor formation, in the patient. For example, an individual at risk of relapse of a tumor or other form of cancer after treatment and obtaining a state of remission can be treated with the methods of the present disclosure to present relapse.

[0589] A therapeutically effective amount can be the amount of conjugates, antibody constructs, or pharmaceutical compositions or an active component thereof sufficient to provide a beneficial effect or to otherwise reduce a detrimental non-beneficial event to the individual to whom the composition is administered. A therapeutically effective dose can be a dose that produces one or more desired or desirable (e.g., beneficial) effects for which it is administered, such administration occurring one or more times over a given period of time. An exact dose can depend on the purpose of the treatment, and can be ascertainable by one skilled in the art using known techniques.

[0590] The conjugates, antibody constructs, or pharmaceutical compositions described herein that can be used in therapy can be formulated and dosages established in a fashion consistent with good medical practice taking into account the disorder to be treated, the condition of the individual patient, the site of delivery of the conjugate, antibody construct, or pharmaceutical composition, the method of administration and other factors known to practitioners. The conjugates, antibody constructs, or pharmaceutical compositions can be prepared according to the description of preparation described herein.

[0591] One of ordinary skill in the art would understand that the amount, duration and frequency of administration of a pharmaceutical composition, antibody construct, or conjugate described herein to a subject in need thereof depends on several factors including, for example but not limited to, the health of the subject, the specific disease or condition of the patient, the grade or level of a specific disease or condition of the patient, the additional therapeutics the subject is being or has been administered, and the like.

[0592] The methods, conjugates, antibody constructs, and pharmaceutical compositions described herein can be for administration to a subject in need thereof. Often, administration of the conjugates, recombinant antibodies, antibody constructs, or pharmaceutical compositions can include routes of administration, non-limiting examples of administration routes include intravenous, intraarterial, subcutaneous, subdural, intramuscular, intracranial, intrasternal, intratumoral, or intraperitoneally. Additionally, a pharmaceutical composition, antibody construct, or conjugate can be administered to a subject by additional routes of administration, for example, by inhalation, oral, dermal, intranasal, or intrathecal administration.

[0593] Pharmaceutical compositions, antibody constructs, or conjugates of the present disclosure can be administered to a subject in need thereof in a first administration, and in one or more additional administrations. The one or more additional administrations can be administered to the subject in need thereof minutes, hours, days, weeks or months following the first administration. Any one of the additional administrations can be administered to the subject in need thereof less than 21 days, or less than 14 days, less than 10 days, less than 7 days, less than 4 days or less than 1 day after the first administration. The one or more administrations can occur more than once per day, more than once per week or more than once per month. The conjugates, antibody constructs, or pharmaceutical compositions can be administered to the subject in need thereof in cycles of 21 days, 14 days, 10 days, 7 days, 4 days or daily over a period of one to seven days.

[0594] In some aspects, a pharmaceutical composition comprises any recombinant bispecific antibody as described herein and a pharmaceutically acceptable carrier.

[0595] In some aspects, a pharmaceutical composition comprises the conjugate or antibody construct of as described herein and a pharmaceutically acceptable carrier.

### Increased Dosages and Reduced Side-Effects

[0596] In certain embodiments, the conjugates described herein can be administered in a dosage that is about 10%, about 25%, about 50%, about 100% or greater than an antibody from which one of the tumor antigen binding domains or binding domains that bind to a molecule on a target cell, such as a tumor antigen, or on an immune cell, such as an antigen presenting cell (APC), is derived. For example, a common regimen for administering pertuzumab comprises 840 mg intravenous (IV) administered as an initial dose over 60 minutes, followed every 3 weeks thereafter by 420 mg IV over 30 to 60 minutes. Using a conjugate of this disclosure, an initial dosage can range from 900 mg to 1700 mg or more and a maintenance dose can range from 450 mg to 900 mg or more. An increased initial dose and/or maintenance dose can be used with an conjugate of this disclosure, such as a bispecific tumor targeting conjugate comprising a tumor antigen binding domain that binds to a tumor antigen with at least 80% homology to the amino acid sequence of HER2, EGFR, CMET, HER3, MUC1, MUC16, EPCAM, MSLN, CA6, NAPI2B, TROP2, CEA, CLDN18.2, EGFRvIII, FAP, EphA2, RON, LY6E, FRA, PSMA, DLL3, PTK7, LIV1, ROR1, MAGE-A3, NY-ESO-1, LRRC15, GLP-3, or a fragment thereof, as compared with the respective parental monoclonal antibody. An increased initial dose and/or maintenance dose also can be used with any bispecific tumor targeting conjugate of this disclosure, such as bispecific tumor targeting conjugate comprising a tumor antigen binding domain that binds to a tumor antigen with at least 80% homology to the amino acid sequence of LRRC15, GLP-3, CLDN6, CLDN16, UPK1B, VTCN1 and STRA6, or a fragment thereof, as compared with the respective parental monoclonal antibody. Antibodies that bind costimulatory molecules or other cell surface molecules on immune cells such as APCs can have small therapeutic windows and high dose-limiting toxicity. For example, the antibody CP-870,893 can be shown to have a maximum tolerated dosage of 0.2 mg/kg to 0.3 mg/kg. Using a bispecific tumor targeting conjugate of this disclosure can allow administration of the conjugate at greater than 0.2 mg/kg to 0.3 mg/kg that comprises a binding domain derived from CP-870,893 or any binding domain that binds to a molecule on an immune cell with at least 80% homology to the amino acid sequence of CD40, DEC-205, CD36 mannose scavenger receptor 1, DC-SIGN, CLEC9A, CLEC12A, BDCA-2, OX40L, 41BBL, CD204, MARCO, CLEC5A, Dectin 1, Dectin 2, CLEC10A, CD206, CD64, CD32A, CD16A, HVEM, PD-L1, CD32B, CD47, or a fragment thereof. Using a bispecific tumor targeting conjugate of this disclosure can allow administration of the conjugate at greater than 0.2 mg/kg to 0.3 mg/kg that comprises a binding domain derived from CP-870,893 or any binding domain that binds to a molecule on an immune cell with at least 80% homology to the amino acid sequence of CD40, DEC-205, CD36 mannose scavenger receptor 1, DC-SIGN, CLEC9A, CLEC12A, BDCA-2, OX40L, 41BBL, CD204, MARCO, CLEC5A, Dectin 1, Dectin 2, CLEC10A, CD206, CD64, CD32A, CD16A, HVEM, PD-L1, CD32B, CD47, TNFR2, TREM2, or a fragment thereof. Using a bispecific tumor targeting conjugate of this disclosure can allow administration of the conjugate at greater than 0.2 mg/kg to 0.3 mg/kg that comprises a binding domain derived from CP-870,893 or any binding domain that binds to a molecule on an APC with at least 80% homology to the amino acid sequence of CD40, DEC-205, CD36 mannose scavenger receptor 1, DC-SIGN, CLEC9A, CLEC12A, BDCA-2, OX40L, 41BBL, CD204, MARCO, CLEC5A, Dectin 1, Dectin 2, CLEC10A, CD206, CD64, CD32A, CD16A, HVEM, PD-L1, CD32B, CD47, or a fragment thereof. Using a bispecific tumor targeting conjugate of this disclosure can allow administration of the conjugate at greater than 0.2 mg/kg to 0.3 mg/kg that comprises a binding domain derived from CP-870,893 or any binding domain that binds to a molecule on an APC with at least 80% homology to the amino acid sequence of CD40, DEC-205, CD36 mannose scavenger receptor 1, DC-SIGN, CLEC9A, CLEC12A, BDCA-2, OX40L, 41BBL, CD204, MARCO, CLEC5A, Dectin 1, Dectin 2, CLEC10A, CD206, CD64, CD32A, CD16A, HVEM, PD-L1, CD32B, CD47, TNFR2, TREM2, or a fragment thereof. In certain embodiments, using a bispecific tumor targeting conjugate of this disclosure can allow administration of a conjugate that comprises a binding domain that binds to a molecule on an immune cell, such as an antigen presenting cell, at greater levels than an antibody comprising a binding domain that binds to that molecule on an antigen presenting cell. In certain embodiments, a bispecific tumor targeting conjugate that comprises a binding domain that binds to a molecule on an immune cell, such as an antigen presenting cell, can be administered at levels equivalent to that of an antibody from which the binding domain is derived. In certain embodiments, the bispecific tumor targeting conjugate can be administered at a level higher than the maximum tolerated dose for bispecific tumor targeting antibody construct in the absence of a conjugated immune-stimulatory compound. In certain embodiments, if the bispecific tumor targeting antibody construct is conjugated to a chemotherapeutic agent, then the conjugate can be administered at a level higher than the maximum tolerated dose for that chemotherapeutic agent administered in the absence of the chemotherapeutic agent conjugated to a bispecific tumor targeting antibody construct. In certain embodiments, administration of the bispecific tumor targeting conjugate can be associated with fewer side effects than an antibody from which one of binding domains is derived. In certain embodiments, administration of the bispecific tumor targeting conjugate can be associated with fewer side effects than when the immune-stimulatory compound is conjugated to an antibody from which one of binding domains is derived. In certain embodiments, administration of the bispecific tumor targeting antibody construct conjugated to a chemotherapeutic agent can be associated with fewer side effects than when the chemotherapeutic agent is conjugated to an antibody from which one of binding domains is derived.

[0597] In some embodiments described herein is a method of treating a subject in need thereof, comprising administering to the individual a therapeutic dose of a recombinant bispecific antibody, or the pharmaceutical composition, to an individual having cancer. In some embodiments, the administering comprises administering the recombinant bispecific antibody, or the pharmaceutical composition, intravenously, cutaneously, subcutaneously, or injected at a site of affliction. In some embodiments, the recombinant bispecific antibody induces more potent immune activation to cancer cells or tissue as compared to non-cancerous tissue. In some further embodiments, when the recombinant antibody is administered intraveneously to the subject at the minimum anticipated biological effect level of the recombinant antibody, a biological effect of the recombinant antibody is greater when the recombinant antibody is bound to the tumor associated antigen at the cancer and to the molecule on the antigen presenting cell as compared to the biological effect of the recombinant antibody when it is not bound to the tumor associated antigen but is bound to the molecule on the antigen presenting cell.

[0598] In additional aspects, the recombinant bispecific antibodies and conjugates thereof can have an increased minimum anticipated biological effect level (MABEL), as compared to a corresponding mono-specific antibody or conjugate. The MABEL of the recombinant bispecific antibody is higher than the MABEL of the control monospecific antibody or conjugate. When the recombinant bispecific antibody is administered to a subject at the MABEL, the biological effect is greater when the target antigen binding domain is bound to its tumor associated antigen as compared to the biological effect of the recombinant antibody when the recombinant antibody is not bound to the tumor associated antigen. In some embodiments, the biological effect is greater when the target antigen binding domain is bound to its tumor associated antigen and the effector antigen binding domain is bound to the molecule on the antigen presenting cell as compared to the biological effect of the recombinant antibody when the recombinant antibody is not bound to the tumor associated antigen but the effector antigen binding domain is bound to the molecule on the antigen presenting cell. The biological effect can be immune activation.

[0599] MABEL is the anticipated dose needed that results in a biological effect in a human subject, in which a biological effect is measured by an in vitro, ex vivo, and/or in vivo assay that measures a selected biological, biochemical, pharmacological, or pharmacodynamic effect. A selected biological, biochemical, pharmacological, or pharmacodynamic effect can be secretion of one or more cytokines, secretion of one or more chemokines, expression level of one or more cell surface proteins associated with immune stimulation, or activity of one or more immune cell functions. For example, the secretion of one or more cytokines can be the secretion of one or more of IL-6, TNFα, IL-12p40, IL-12p70, and/or IL-10. Secretion of one or more chemokines can be IL-8, IP-10, MIP-1α, and/or MIP-113. Expression level of one or more cell surface proteins associated with immune stimulation can be CD54, CD86, CD80, MHC class II, and/or CD83. Activity of one or more immune cell functions can be antibody-dependent cell-mediated cytotoxicity, antibody dependent cellular phagocytosis, and/or antigen cross-presentation.

[0600] In some aspects, when dosing intraveneously at the MABEL of the recombinant antibody, when the recombinant antibody is bound to the tumor associated antigen the biological effect can be at least two times, five times, or ten times greater than the biological effect of the recombinant antibody when the recombinant antibody is not bound to the tumor associated antigen. The biological effect can be immune activation.

[0601] In some aspects, method of treating a subject in need thereof, comprising administering to the subject a therapeutic dose of any recombinant bispecific antibody as described herein or the pharmaceutical composition of any recombinant bispecific antibody as described herein. In some embodiments, the subject has cancer.

[0602] In some embodiments, the recombinant bispecific antibody or the pharmaceutical composition is administered intravenously, cutaneously, subcutaneously, or injected at a site of affliction. In some embodiments, the recombinant bispecific antibody induces greater immune activation against a cancer as measured by a decrease in cancer cell number or volume as compared to non-cancerous tissue.

[0603] In some embodiments, the recombinant bispecific antibody is administered intravenously to the subject at a minimum anticipated biological effect level of the recombinant bispecific antibody, a biological effect of the recombinant bispecific antibody is greater when the recombinant bispecific antibody is bound to the tumor associated antigen and to the antigen on the antigen presenting cell as compared to the biological effect of the recombinant bispecific antibody when it is not bound to the tumor associated antigen but is bound to the antigen on the antigen presenting cell; and wherein the biological effect is immune activation as measured by one or more of the group selected from secretion of one or more cytokines, secretion of one or more chemokines, expression level of one or more cell surface proteins associated with immune stimulation, antibody-dependent cell-mediated cytotoxicity, antibody dependent cellular phagocytosis, and antigen cross-presentation.

[0604] In some embodiments, the recombinant bispecific antibody is administered intravenously to the subject at the minimum anticipated biological effect level of the recombinant bispecific antibody, it induces a greater biological effect at the site of the cancer than at a non-cancerous site and wherein the biological effect is immune activation as measured by one or more of the group selected from secretion of one or more cytokines, secretion of one or more chemokines, expression level of one or more cell surface proteins associated with immune stimulation, antibody-dependent cell-mediated cytotoxicity, antibody dependent cellular phagocytosis, and antigen cross-presentation.

### Additional Therapeutic Agents

[0605] In certain embodiments, conjugates, antibody constructs, recombinant bispecific antibodies, pharmaceutical compositions thereof, and methods provided herein can be administered with or during treatment with an additional therapeutic agent. As will be appreciated by the skilled artisan, the following description as applied to antibody constructs and conjugates comprising antibody constructs is applicable to recombinant bispecific antibodies and conjugates comprising recombinant bispecific antibodies

[0606] In certain embodiments, the therapeutic agent comprises a recombinant protein or monoclonal antibody. In certain embodiments, the recombinant protein or monoclonal antibody comprises Etaracizumab (Abegrin), Tacatuzumab tetraxetan, Bevacizumab (Avastin), Labetuzumab, Cetuximab (Erbitux), Obinutuzumab (Gazyva), Trastuzumab (Herceptin), Clivatuzumab, Trastuzumab emtansine (Kadcyla), Rituximab (MabThera, Rituxan), Gemtuzumab ozogamicin (Mylotarg), Girentuximab (Rencarex), or Nimotuzumab (Theracim, Theraloc). In certain embodiments, the additional therapeutic agent is a chemotherapeutic agent. In certain embodiments, the chemotherapeutic agent is an alkylating agent (e.g., cyclophosphamide, ifosfamide, chlorambucil, busulfan, melphalan, mechlorethamine, uramustine, thiotepa, nitrosoureas, or temozolomide), an anthracycline (e.g., doxorubicin, adriamycin, daunorubicin, epirubicin, or mitoxantrone), a cytoskeletal disruptor (e.g., paclitaxel or docetaxel), a histone deacetylase inhibitor (e.g., vorinostat or romidepsin), an inhibitor of topoisomerase (e.g., irinotecan, topotecan, amsacrine, etoposide, or teniposide), a kinase inhibitor (e.g., bortezomib, erlotinib, gefitinib, imatinib, vemurafenib, or vismodegib), a nucleoside analog or precursor analog (e.g., azacitidine, azathioprine, capecitabine, cytarabine, fluorouracil, gemcitabine, hydroxyurea, mercaptopurine, methotrexate, or thioguanine), a peptide antibiotic (e.g., actinomycin or bleomycin), a platinum-based agent (e.g., cisplatin, oxaloplatin, or carboplatin), or a plant alkaloid (e.g., vincristine, vinblastine, vinorelbine, vindesine, podophyllotoxin, paclitaxel, or docetaxel). In some embodiments, the chemotherapeutic agent is a nucleoside analog. In some embodiments, the chemotherapeutic agent is gemcitabine. In certain embodiments, the additional therapeutic agent is radiation therapy.

[0607] In some embodiments, the recombinant bispecific antibody further comprises a chemotherapeutic compound and a linker, wherein the linker links the chemotherapeutic compound to the Fc comprising domain.

[0608] In some embodiments, the chemotherapeutic compound comprises an alkylating agent, an anthracycline, a cytoskeletal disruptor, a histone deacetylase inhibitor, an inhibitor of, a kinase inhibitor, a nucleoside analog or precursor analog, a peptide antibiotic, a platinum-based compound, or a plant alkaloid.

[0609] In some aspects, a method of treatment for a subject in need thereof comprises administering a therapeutic dose of the antibody construct or conjugate as described herein or the pharmaceutical composition as described herein. In some embodiments, the subject has cancer.

[0610] In some embodiments, the antibody construct or conjugate is administered intravenously, cutaneously, subcutaneously, or injected at a site of affliction. In some embodiments, after administration of antibody construct or conjugate to the subject, immune cell activation is increased in the subject as measured by a secretion of one or more cytokines as measured by a cytokine release assay, a secretion of one or more chemokines as measured by an ELISA immunoassay, an expression level of one or more cell surface proteins associated with immune stimulation as measured by an ELISA immunoassay, an activity of one or more immune cell functions, or combination thereof, as compared to before administration of the antibody construct or conjugate to the subject.

[0611] In some embodiments, the activity of one or more immune cell functions comprises antibody-dependent cell-mediated cytotoxicity as measured by an ADCC assay, antibody dependent cellular phagocytosis as measured by an ADCP assay, or antigen cross-presentation as measured by a cross-presentation assay.

[0612] In some embodiments, after administration of the antibody construct or conjugate to the subject, tumor cell intracellular signaling is altered in the subject as compared to tumor cell intracellular signaling before administration of the antibody construct or conjugate as measured by an intracellular signaling assay.

[0613] In some embodiments, the altered tumor cell intracellular signaling increases tumor immunogenicity as measured by an immunogencity assay.

[0614] In some aspects, a kit comprising a pharmaceutically acceptable dosage unit of a pharmaceutically effective amount of the conjugate or antibody construct as described herein or the pharmaceutical composition as described herein.

### Diseases, Conditions and the Like

[0615] The conjugates, antibody constructs, recombinant bispecific antibodies, pharmaceutical compositions thereof, and methods provided herein can be useful for the treatment of a plurality of diseases, conditions, preventing a disease or a condition in a subject or other therapeutic applications for subjects in need thereof. As will be appreciated by the skilled artisan, the following description as applied to antibody constructs and conjugates comprising antibody constructs is applicable to recombinant bispecific antibodies and conjugates comprising recombinant bispecific antibodies.

[0616] Often the conjugates, antibody constructs, pharmaceutical compositions, and methods provided herein can be useful for treatment of hyperplastic conditions, including but not limited to, neoplasms, cancers, tumors and the like. A condition, such as a cancer, can be associated with expression of a molecule on the cancer cells. Often, the molecule expressed by the cancer cells can comprise an extracellular portion capable of recognition by the antibody portion of the antibody construct. A molecule expressed by the cancer cells can be a tumor antigen. An antibody portion of the conjugate or pharmaceutical composition can recognize a tumor antigen. A tumor antigen can include CD5, CD19, CD20, CD25, CD37, CD30, CD33, CD45, CAMPATH-1, BCMA, CS-1, PD-L1, B7-H3, B7-DC, HLA-DR, carcinoembryonic antigen (CEA), TAG-72, EpCAM, MUC1, folate-binding protein, A33, G250, prostate-specific membrane antigen (PSMA), ferritin, GD2, GD3, GM2, Le^{y}, CA-125, CA19-9, epidermal growth factor, p185HER2, IL-2 receptor, EGFRVIII (de2-7 EGFR), fibroblast activation protein, tenascin, a metalloproteinase, endosialin, vascular endothelial growth factor, αvβ3, WT1, LMP2, HPV E6 E7, Her-2/neu, MAGE A3, p53 nonmutant, NY-ESO-1, MelanA/MART1, Ras mutant, gp100, p53 mutant, PR1, bcr-abl, tyrosinase, survivin, PSA, hTERT, a Sarcoma translocation breakpoint fusion protein, EphA2, PAP, ML-IAP, AFP, ERG, NA17, PAX3, ALK, androgen receptor, cyclin B1, polysialic acid, MYCN, RhoC, TRP-2, fucosyl GM1, mesothelin (MSLN), PSCA, MAGE A1, MAGE A3, sLe(animal), CYP1B1, PLAV1, GM3, BORIS, Tn, GloboH, ETV6-AML, NY-BR-1, RGS5, SART3, STn, Carbonic anhydrase IX, PAX5, OY-TES1, Sperm protein 17, LCK, HMWMAA, AKAP-4, SSX2, XAGE 1, B7H3, Legumain, Tie 3, Page4, VEGFR2, MAD-CT-1, PDGFR-B, MAD-CT-2, ROR2, TRAIL1, MUC16, MAGE A4, MAGE C2, GAGE, EGFR, CMET, HER3, CA6, NAPI2B, TROP2, Claudin-6 (CLDN6), Claudin-16 (CLDN16), CLDN18.2, RON, LY6E, FRA, DLL3, PTK7, Uroplakin-1B (UPK1B), VTCN1 (B7-H4), STRA6, TMPRSS3, TMRRSS4, TMEM238, C1orf186, LIV1, ROR1, Fos-related antigen 1, VEGFR1, endoglin, VISTA, or a fragment thereof.

[0617] As described herein, an antigen binding domain portion of the conjugate, can be configured to recognize a molecule expressed by a cancer cell, such as for example, a disease antigen, tumor antigen or a cancer antigen. Often such antigens are known to those of ordinary skill in the art, or newly found to be associated with such a condition, to be commonly associated with, and/or, specific to, such conditions. For example, a disease antigen, tumor antigen or a cancer antigen is, but is not limited to, CD5, CD19, CD20, CD25, CD37, CD30, CD33, CD45, CAMPATH-1, BCMA, CS-1, PD-L1, B7-H3, B7-DC, HLA-DR, carcinoembryonic antigen (CEA), TAG-72, EpCAM, MUC1, folate-binding protein, A33, G250, prostate-specific membrane antigen (PSMA), ferritin, GD2, GD3, GM2, Le^{y}, CA-125, CA19-9, epidermal growth factor, p185HER2, IL-2 receptor, EGFRvIII (de2-7 EGFR), fibroblast activation protein, tenascin, a metalloproteinase, endosialin, vascular endothelial growth factor, αvβ3, WT1, LMP2, HPV E6, HPV E7, Her-2/neu, MAGE A3, p53 nonmutant, NY-ESO-1, MelanA/MART1, Ras mutant, gp100, p53 mutant, PR1, bcr-abl, tyrosinase, survivin, PSA, hTERT, a Sarcoma translocation breakpoint fusion protein, EphA2, PAP, ML-IAP, AFP, ERG, NA17, PAX3, ALK, androgen receptor, cyclin B1, polysialic acid, MYCN, RhoC, TRP-2, fucosyl GM1, mesothelin (MSLN), PSCA, MAGE A1, MAGE A3, sLe(animal), CYP1B1, PLAV1, GM3, BORIS, Tn, GloboH, ETV6-AML, NY-BR-1, RGS5, SART3, STn, Carbonic anhydrase IX, PAX5, OY-TES1, Sperm protein 17, LCK, HMWMAA, AKAP-4, SSX2, XAGE 1, B7H3, Legumain, Tie 3, Page4, VEGFR2, MAD-CT-1, PDGFR-B, MAD-CT-2, ROR2, TRAIL1, MUC16, MAGE A4, MAGE C2, GAGE, EGFR, CMET, HER3, CA6, NAPI2B, TROP2, Claudin-6 (CLDN6), Claudin-16 (CLDN16), CLDN18.2, RON, LY6E, FRA, DLL3, PTK7, Uroplakin-1B (UPK1B), VTCN1 (B7-H4), STRA6, TMPRSS3, TMRRSS4, TMEM238, C1orf186, LIV1, ROR1, Fos-related antigen 1, VEGFR1, endoglin, VISTA, or a fragment thereof. Additionally, such tumor antigens can be derived from the following specific conditions and/or families of conditions, including but not limited to, cancers such as brain cancers, skin cancers, lymphomas, sarcomas, lung cancer, liver cancer, leukemias, uterine cancer, breast cancer, ovarian cancer, cervical cancer, bladder cancer, kidney cancer, hemangiosarcomas, bone cancers, blood cancers, testicular cancer, prostate cancer, stomach cancer, intestinal cancers, pancreatic cancer, and other types of cancers as well as pre-cancerous conditions such as hyperplasia or the like.

[0618] Non-limiting examples of cancers can include Acute lymphoblastic leukemia (ALL); Acute myeloid leukemia; Adrenocortical carcinoma; Astrocytoma, childhood cerebellar or cerebral; Basal-cell carcinoma; Bladder cancer; Bone tumor, osteosarcoma/malignant fibrous histiocytoma; Brain cancer; Brain tumors, such as, cerebellar astrocytoma, malignant glioma, ependymoma, medulloblastoma, visual pathway and hypothalamic glioma; Brainstem glioma; Breast cancer; Bronchial adenomas/carcinoids; Burkitt's lymphoma; Cerebellar astrocytoma; Cervical cancer; Cholangiocarcinoma; Chondrosarcoma; Chronic lymphocytic leukemia; Chronic myelogenous leukemia; Chronic myeloproliferative disorders; Colon cancer; Cutaneous T-cell lymphoma; Endometrial cancer; Ependymoma; Esophageal cancer; Eye cancers, such as, intraocular melanoma and retinoblastoma; Gallbladder cancer; Glioma; Hairy cell leukemia; Head and neck cancer; Heart cancer; Hepatocellular (liver) cancer; Hodgkin lymphoma; Hypopharyngeal cancer; Islet cell carcinoma (endocrine pancreas); Kaposi sarcoma; Kidney cancer (renal cell cancer); Laryngeal cancer; Leukaemia, such as, acute lymphoblastic, acute myeloid, chronic lymphocytic, chronic myelogenous and, hairy cell; Lip and oral cavity cancer; Liposarcoma; Lung cancer, such as, non-small cell and small cell; Lymphoma, such as, AIDS-related, Burkitt; Lymphoma, cutaneous T-Cell, Hodgkin and Non-Hodgkin, Macroglobulinemia, Malignant fibrous histiocytoma of bone/osteosarcoma; Melanoma; Merkel cell cancer; Mesothelioma; Multiple myeloma/plasma cell neoplasm; Mycosis fungoides; Myelodysplastic syndromes; Myelodysplastic/myeloproliferative diseases; Myeloproliferative disorders, chronic; Nasal cavity and paranasal sinus cancer; Nasopharyngeal carcinoma; Neuroblastoma; Oligodendroglioma; Oropharyngeal cancer; Osteosarcoma/malignant fibrous histiocytoma of bone; Ovarian cancer; Pancreatic cancer; Parathyroid cancer; Pharyngeal cancer; Pheochromocytoma; Pituitary adenoma; Plasma cell neoplasia; Pleuropulmonary blastoma; Prostate cancer; Rectal cancer; Renal cell carcinoma (kidney cancer); Renal pelvis and ureter, transitional cell cancer; Rhabdomyosarcoma; Salivary gland cancer; Sarcoma, Ewing family of tumors; Sarcoma, Kaposi; Sarcoma, soft tissue; Sarcoma, uterine; Sézary syndrome; Skin cancer (non-melanoma); Skin carcinoma; Small intestine cancer; Soft tissue sarcoma; Squamous cell carcinoma; Squamous neck cancer with occult primary, metastatic; Stomach cancer; Testicular cancer; Throat cancer; Thymoma and thymic carcinoma; Thymoma; Thyroid cancer; Thyroid cancer, childhood; Uterine cancer; Vaginal cancer; Waldenstrim macroglobulinemia; Wilms tumor and any combination thereof.

[0619] In certain embodiments, the recombinant bispecific antibodies and conjugates comprising recombinant bispecific antibodies are useful for the treatment of a cancer or tumor. In certain embodiments, the cancer comprises breast, heart, lung, small intestine, colon, spleen, kidney, bladder, head, neck, ovarian, prostate, brain, pancreatic, skin, bone, bone marrow, blood, thymus, uterine, testicular and liver tumors. In certain embodiments, tumors which can be treated with the recombinant bispecific antibodies (including conjugates thereof) comprise adenoma, adenocarcinoma, angiosarcoma, astrocytoma, epithelial carcinoma, germinoma, glioblastoma, glioma, hemangioendothelioma, hemangiosarcoma, hematoma, hepatoblastoma, leukemia, lymphoma, medulloblastoma, melanoma, neuroblastoma, osteosarcoma, retinoblastoma, rhabdomyosarcoma, sarcoma and/or teratoma. In certain embodiments, the tumor/cancer is selected from the group of acral lentiginous melanoma, actinic keratosis, adenocarcinoma, adenoid cystic carcinoma, adenomas, adenosarcoma, adenosquamous carcinoma, astrocytic tumors, Bartholin gland carcinoma, basal cell carcinoma, bronchial gland carcinoma, capillary carcinoid, carcinoma, carcinosarcoma, cholangiocarcinoma, chondrosarcoma, cystadenoma, endodermal sinus tumor, endometrial hyperplasia, endometrial stromal sarcoma, endometrioid adenocarcinoma, ependymal sarcoma, Swing's sarcoma, focal nodular hyperplasia, gastronoma, germ line tumors, glioblastoma, glucagonoma, hemangioblastoma, hemangioendothelioma, hemangioma, hepatic adenoma, hepatic adenomatosis, hepatocellular carcinoma, insulinite, intraepithelial neoplasia, intraepithelial squamous cell neoplasia, invasive squamous cell carcinoma, large cell carcinoma, liposarcoma, lung carcinoma, lymphoblastic leukemia, lymphocytic leukemia, leiomyosarcoma, melanoma, malignant melanoma, malignant mesothelial tumor, nerve sheath tumor, medulloblastoma, medulloepithelioma, mesothelioma, mucoepidermoid carcinoma, myeloid leukemia, multiple myeloma, neuroblastoma, neuroepithelial adenocarcinoma, nodular melanoma, osteosarcoma, ovarian carcinoma, papillary serous adenocarcinoma, pituitary tumors, plasmacytoma, pseudosarcoma, prostate carcinoma, pulmonary blastoma, renal cell carcinoma, retinoblastoma, rhabdomyosarcoma, sarcoma, serous carcinoma, squamous cell carcinoma, small cell carcinoma, soft tissue carcinoma, somatostatin secreting tumor, squamous carcinoma, squamous cell carcinoma, undifferentiated carcinoma, uveal melanoma, verrucous carcinoma, vagina/vulva carcinoma, vipoma, and Wilm's tumor. In certain embodiments, the tumor/cancer to be treated with one or more recombinant bispecific antibodies (including conjugates thereof) comprise brain cancer, head and neck cancer, colorectal carcinoma, acute myeloid leukemia, pre-B-cell acute lymphoblastic leukemia, bladder cancer, astrocytoma, preferably grade II, III or IV astrocytoma, glioblastoma, glioblastoma multiforme, small cell cancer, and non-small cell cancer, preferably non-small cell lung cancer, lung adenocarcinoma, metastatic melanoma, androgen-independent metastatic prostate cancer, androgen-dependent metastatic prostate cancer, prostate adenocarcinoma, and breast cancer, preferably breast ductal cancer, and/or breast carcinoma. In certain embodiments, the cancer treated with the recombinant bispecific antibodies (including conjugates thereof) comprises glioblastoma. In certain embodiments, the cancer treated with one or more recombinant bispecific antibodies (including conjugates thereof) comprises pancreatic cancer. In certain embodiments, the cancer treated with one or more recombinant bispecific antibodies (including conjugates thereof) comprises ovarian cancer. In certain embodiments, the cancer treated with one or more recombinant bispecific antibodies (including conjugates thereof) comprises or lung cancer.

[0620] In certain embodiments, the recombinant bispecific antibodies (including conjugates thereof) can be administered by any route suitable for the administration of antibody-containing pharmaceutical compositions, such as, for example, cutaneous, subcutaneous, intraperitoneal, intravenous, intramuscular, intratumoral, intracerebral, or at a tumor afflicted site, etc. In certain embodiments, the recombinant bispecific antibodies (including conjugates thereof) are administered intravenously. In certain embodiments, the recombinant bispecific antibodies (including conjugates thereof) are administered on a suitable dosage schedule, for example, weekly, twice weekly, three times weekly, once every two weeks, once every three weeks, monthly, twice monthly, three times monthly, etc. The recombinant bispecific antibodies (including conjugates thereof) can be administered in any therapeutically effective amount. In certain embodiments, the therapeutically acceptable amount is between about 0.1 mg/kg and about 50 mg/kg. In certain embodiments, the therapeutically acceptable amount is between about 1 mg/kg and about 40 mg/kg. In certain embodiments, the therapeutically acceptable amount is between about 5 mg/kg and about 30 mg/kg. In certain embodiments, the therapeutically acceptable amount is between about 1 mg/kg and about 10 mg/kg.

### EXAMPLES

[0621] The following examples are included to further describe some embodiments of the present disclosure, and should not be used to limit the scope of the disclosure

### Example 1

### Synthesis of Linkers with Immune-Stimulatory Compounds

[0622] A linker is linked with an immune-stimulatory compound. A linker linked to an immune-stimulatory compound is formed to make a linker-immune stimulatory compound construct (ATAC). Subsequently, an ATAC is conjugated to an antibody, in which the ATAC is any one of ATAC1-ATAC34 (each of which is described in the below EXAMPLES).

[0623] A linker is linked with an antibody, in which the linker is a PEGylated linker, a linker containing a valine-alanine dipeptide, a linker containing a valine-citrulline dipeptide, or an N-Maleimidomethylcyclohexane-1-carboxylate (MCC) linker. Subsequently, an immune-stimulatory compound is conjugated to the linker linked with the antibody or antibody construct, in which the immune-stimulatory compound is a TLR agonist, a Nod-like receptor ligand, a RIG-Like receptor agonist, a CLR ligand, a CDS ligand, or an inflammasome inducer.

[0624] A linker is linked with an antibody or antibody construct, in which the linker is a PEGylated linker, a linker containing a valine-alanine dipeptide, a linker containing a valine-citrulline dipeptide, or an N-Maleimidomethylcyclohexane-1-carboxylate (MCC) linker. Subsequently, an immune-stimulatory compound is conjugated to the linker linked with the antibody or antibody construct, in which the immune-stimulatory compound is gardiquimod or an analog of a cyclic dinucleotide.

### Example 2

### Synthesis of ATAC1 and ATAC2

[0625] This example shows the synthesis of pentafluorophenyl 25-(2-amino-3-pentylquinolin-5-yl)-19-oxo-4,7,10,13,16-pentaoxa-20-azapentacosanoate (ATAC1) and Perfluorophenyl 3-((4-amino-1-(2-hydroxy-2-methylpropyl)-1H-imidazo[4,5-c]quinolin-2-yl)methyl)-4-oxo-7,10,13,16,19-pentaoxa-3-azadocosan-22-oate (ATAC2).

[chemical structure]

### Step A: Preparation of Int ATAC1-1

[chemical structure]

[0627] To a 0° C. solution containing 271 mg (0.90 mmol) of 5-(5-aminopentyl)-3-pentylquinolin-2-amine in 4 mL of DCM was added 435 mg (1.00 mmol) of the NHS ester in 1 mL of DCM dropwise over 15 minutes. The reaction mixture was allowed to warm to ambient temperature over 19h before it was concentrated and purified by reverse phase chromatography. Pure fractions were lyophilized and dissolved in 3 mL of methanol then treated with 1 mL of 4N HCl in dioxane. The solution was stirred for 1h then concentrated to afford the desired compound as an HCl salt which was used directly in the next step.

### Step B: Preparation of ATAC1

[chemical structure]

[0629] To a stirred solution of 25-(2-amino-3-pentylquinolin-5-yl)-19-oxo-4,7,10,13,16-pentaoxa-20 azapentacosanoic acid hydrochloride (130 mg, 0.198 mmol) and pentafluorophenol (146 mg, 0.792 mmol) in DMF (2.5 ml) at room temperature was added N,N′-Diisopropylcarbodiimide (0.186 ml, 1.189 mmol) dropwise. The reaction was stirred at room temperature for 18h and then concentrated. The crude product was added to a 100 g C18 gold reverse phase column and was eluted with water/acetonitrile (0.1% TFA) 10-100%. The fractions were combined and concentrated then freeze dried to give perfluorophenyl 25-(2-amino-3-pentylquinolin-5-yl)-19-oxo-4,7,10,13,16-pentaoxa-20-azapentacosanoate-2,2,2-trifluoroacetate (110 mg, 61.7% yield) as a clear gum. ¹H NMR (DMSO-d⁶) δ 13.7 (s, 1H), 8.37-8.35 (m, 3H), 7.78 (t, J=5.5 Hz, 1H), 7.63 (t, J=7.5 Hz, 1H), 7.53 (d, J=8.5 Hz, 1H), 7.31 (d, J=7.0 Hz, 1H), 3.58 (t, J=6.0 Hz, 2H), 3.63-3.43 (m, 20H), 3.04-2.96 (m, 6H), 2.73 (t, J=7.5 Hz, 2H), 2.27 (t, J=7.5 Hz, 2H), 1.60-1.55 (m, 4H), 1.44-1.33 (m, 9H), 0.88 (t, J=7.5 Hz, 3H). LCMS [M+H]=786.3.

[0630] The following compound in TABLE 21 can be prepared using a method similar to that described above for ATAC1.

TABLE 21

| Com- | | | |
|---|---|---|---|
| pound | Structure | IUPAC | M + 1 |
| ATAC2 | [chemical structure] | Perfluorophenyl 3- ((4-amino- 1-(2-hydroxy-2- methylpropyl)-1H- imidazo[4,5-c]quinolin-2- yl)methyl)-4-oxo- 7,10,13,16,19-pentaoxa-3- azadocosan-22-oate | 800 |

### Example 3

### Synthesis of ATAC3 and ATAC4

[0631] This example shows the synthesis of pentafluorophenyl 25-(2-amino-3-pentylquinolin-5-yl)-19-oxo-4,7,10,13,16-pentaoxa-20-azapentacosanoate (ATAC3) and 2,5-Dioxopyrrolidin-1-yl 3-((4-amino-1-(2-hydroxy-2-methylpropyl)-1H-imidazo-[4,5-c]quinolin-2-yl)methyl)-4-oxo-7,10,13,16,19-pentaoxa-3-azadocosan-22-oate (ATAC4).

[chemical structure]

### Step A: Preparation of ATAC3

[0632] To a stirred solution of Int ATAC1-1 (185 mg, 0.282 mmol) and N-hydroxysuccinimide (130 mg, 1.128 mmol) in DMF (3 ml) was added N,N′-diisopropylcarbodiimide (0.221 ml, 1.411 mmol) dropwise and the reaction mixture was stirred at room temperature for 18 hours. The reaction mixture was filtered and washed with acetonitrile and the filtrate was evaporated. The resulting residue was purified by silica gel Silica gel column chromatography (DCM/MeOH/HOAc) to give 65 mg of the desired product as the acetic acid salt which was subsequently dissolved in 2 mL of DCM and treated with 2M HCl in diethyl ether. The solution was stirred for 1h then concentrated and lyophilized to afford the desired compound as the HCl salt. ¹H NMR (CDCl₃) δ 15.2 (s, 1H), 8.15 (d, J=7.8 Hz, 1H), 7.68 (d, J=7.9 Hz, 1H), 7.55 (t, J=8.1 Hz, 1H), 6.55 (bs, 1H), 3.98 (t, J=6.0 Hz, 2H), 3.83-3.55 (m, 18H), 3.33-3.22 (m, 2H), 2.95-2.56 (m, 11H), 2.27 (t, J=7.5 Hz, 2H), 1.60-1.55 (m, 4H), 1.44-1.33 (m, 9H), 0.88 (t, J=7.5 Hz, 3H). LCMS [M+H]=717.3.

[0633] The following 2,5-Dioxopyrrolidin-1-yl 3-((4-amino-1-(2-hydroxy-2-methylpropyl)-1H-imidazo-[4,5-c]quinolin-2-yl)methyl)-4-oxo-7,10,13,16,19-pentaoxa-3-azadocosan-22-oate (ATAC4) compound can be prepared using a method similar to that described above for ATAC3.

[chemical structure]

[0634] ¹H NMR (CDCl₃) δ 14.9 (s, 1H), 8.88 (bs, 1H), 8.15 (d, 1H), 7.85 (d, 1H), 7.61 (t, 1H), 7.45 (t, 1H), 4.72 (s, 2H), 3.83 (m, 4H), 3.65-3.45 (m, 18H), 2.90-2.71 (m, 9H), 1.43 (t, J=7.0 Hz, 3H), 1.33 (s, 6H). LCMS [M+H]=731.

### Example 4

### Synthesis of ATAC5, ATAC6 and ATAC7

[0635] This example shows the synthesis of 2,5-dioxopyrrolidin-1-yl 6-(((S)-1-(((S)-1-((4-((((5-(2-amino-3-pentylquinolin-5-yl)pentyl)carbamoyl)oxy)methyl)phenyl)amino)-1-oxopropan-2-yl)amino)-3-methyl-1-oxobutan-2-yl)amino)-6-oxohexanoate (ATAC5), 2,5-dioxopyrrolidin-1-yl 7-(((S)-1-(((S)-1-((4-(((((4-amino-1-(2-hydroxy-2-methylpropyl)-1H-imidazo[4,5-c]quinolin-2-yl)methyl)(ethyl)carbamoyl)oxy)methyl)phenyl)amino)-1-oxopropan-2-yl)amino)-3-methyl-1-oxobutan-2-yl)amino)-7-oxoheptanoate (ATAC6), and 2,5-dioxopyrrolidin-1-yl 7-(((S)-1-(((S)-1-((4-(((((4-amino-1-(2-hydroxy-2-methylpropyl)-1H-imidazo[4,5-c]quinolin-2-yl)methyl)(ethyl)carbamoyl)oxy)methyl)phenyl)amino)-1-oxo-5-ureidopentan-2-yl)amino)-3-methyl-1-oxobutan-2-yl)amino)-7-oxoheptanoate (ATAC7).

[chemical structure]

### Step A: Preparation of Int ATAC5-1

[chemical structure]

[0637] A solution of 5-(5-aminopentyl)-3-pentylquinolin-2-amine (300 mg, 1.00 mmol) in 5 mL DCM was stirred at room temperature under nitrogen for 10 min before tert-butyladipate-valine-alanine-para-aminobenzyl-4-nitrophenylcarbonate (tBuAdip-va-PAB-OPNP, 656 mg, 1.00 mmol) and DIPEA (0.26 ml, 1.5 mmol) in 3 mL of DCM were added and the mixture was stirred at room temperature overnight. The mixture was concentrated and purified by column chromatography. Clean fractions were combined and evaporated and the residue was dissolved in 2 mL of DCM and treated with 2M HCl in diethyl ether. The solution was stirred for 1h then concentrated and lyophilized to afford the desired compound Int ATAC5-1 as the HCl salt. MS m/z 761 (M)⁺.

### Step B: Preparation of ATAC5

[chemical structure]

[0639] To a stirred solution of 6-(((S)-1-(((S)-1-((4-((((5-(2-amino-3-pentylquinolin-5-yl)pentyl)carbamoyl)oxy)methyl)phenyl)amino)-1-oxopropan-2-yl)amino)-3-methyl-1-oxobutan-2-yl)amino)-6-oxohexanoic acid hydrochloride (221 mg, 0.282 mmol) and N-hydroxysuccinimide (130 mg, 1.12 mmol) in DMF (3 ml) was added N,N′-diisopropylcarbodiimide (0.221 ml, 1.41 mmol) dropwise and the reaction mixture was stirred at room temperature for 5h. HPLC indicated some starting material remained so the reaction was stirred at ambient temperature overnight. The reaction mixture was filtered and washed with acetonitrile. The filtrate was evaporated and the residue was dissolved in DMSO and purified by reverse phase chromatography [water/acetonitrile (0.1% TFA)] from 10% followed by a gradient from 20 to 80%. Pure fractions were combined to give 2,5-dioxopyrrolidin-1-yl 6-(((S)-1-(((S)-1-((4-((((5-(2-amino-3-pentylquinolin-5-yl)pentyl)-carbamoyl)oxy)methyl)phenyl)amino)-1-oxopropan-2-yl)amino)-3-methyl-1-oxobutan-2-yl)amino)-6-oxohexanoate 2,2,2-trifluoroacetate (109 mg, 40% yield) as a white solid. ¹H NMR (DMSO-d⁶) δ 13.6 (s, 1H), 9.92 (s, 1H), 8.32 (d, J=7.5 Hz, 1H), 7.84 (d, J=8.5 Hz, 1H), 7.61-7.55 (m, 4H), 7.30-7.17 (m, 4H), 4.92 (s, 2H), 4.37 (t, J=7.0 Hz, 1H), 4.18 (t, J=7.0 Hz, 1H), 2.96 (m, 4H), 2.81-2.62 (m, 8H), 2.33-2.11 (m, 2H), 1.95 (q, J=7.0 Hz, 1H), 1.63-1.55 (m, 8H), 1.50-1.40 (m, 2H), 1.38-1.33 (m, 4H), 1.29 (d, J=7.0 Hz, 3H), 0.83 (d, J=7.0 Hz, 6H). LCMS [M+H]=844.3.

[0640] The following ATAC6 compound and ATAC7 compound in TABLE 22 can be prepared using a method similar to that described above for ATAC5.

TABLE 22

| Com- | | | |
|---|---|---|---|
| pound | Structure | Name | M + 1 |
| ATAC6 | [chemical structure] | 2,5-dioxopyrrolidin- 1-yl 7-(((S)-1-(((S)-1- ((4-(((((4- amino-1-(2-hydroxy- 2-methylpropyl)-1H- imidazo[4,5-c] quinolin-2- yl)methyl)(ethyl) carbamoyl)oxy)methyl) | 872 |
| | | phenyl)amino)-1- | |
| | | oxopropan-2-yl) | |
| | | amino)-3- | |
| | | methyl-1-oxobutan- | |
| | | 2-yl)amino)-7- | |
| | | oxoheptanoate | |
| ATAC7 | [chemical structure] | 2,5-dioxopyrrolidin- 1-yl 7-(((S)-1-(((S)-1- ((4-(((((4-amino-1- (2-hydroxy-2- methylpropyl)-1H- imidazo[4,5-c] quinolin-2- yl)methyl)(ethyl) carbamoyl)oxy)methyl) phenyl)amino)-1- oxo-5-ureidopentan- 2-yl)amino)-3- methyl-1- | 958 |
| | | oxobutan-2-yl) | |
| | | amino)-7- | |
| | | oxoheptanoate | |

### Example 5

### Synthesis of ATAC8, ATAC9, and ATAC10

[0641] This example shows synthesis of Perfluorophenyl 6-(((S)-1-(((S)-1-((4-((((5-(2-amino-3-pentylquinolin-5-yl)pentyl)carbamoyl)oxy)methyl)phenyl)amino)-1-oxopropan-2-yl)amino)-3-methyl-1-oxobutan-2-yl)amino)-6-oxohexanoate (ATAC8), perfluorophenyl 7-(((S)-1-(((S)-1-((4-(((((4-amino-1-(2-hydroxy-2-methylpropyl)-1H-imidazo[4,5-c]quinolin-2-yl)methyl)(ethyl)carbamoyl)oxy)methyl)phenyl)amino)-1-oxopropan-2-yl)amino)-3-methyl-1-oxobutan-2-yl)amino)-7-oxoheptanoate (ATAC9), and perfluorophenyl 7-(((S)-1-(((S)-1-((4-(((((4-amino-1-(2-hydroxy-2-methylpropyl)-1H-imidazo[4,5-c]quinolin-2-yl)methyl)(ethyl)carbamoyl)oxy)methyl)phenyl)amino)-1-oxo-5-ureidopentan-2-yl)amino)-3-methyl-1-oxobutan-2-yl)amino)-7-oxoheptanoate (ATAC10).

[chemical structure]

### Step A: Preparation of ATAC8

[chemical structure]

[0643] To a stirred solution of 6-(((S)-1-(((S)-1-((4-((((5-(2-amino-3-pentylquinolin-5-yl)pentyl)carbamoyl)oxy)methyl)phenyl)amino)-1-oxopropan-2-yl)amino)-3-methyl-1-oxobutan-2-yl)amino)-6-oxohexanoic acid hydrochloride (168 mg, 0.215 mmol) and pentafluorophenol (158 mg, 0.86 mmol) in DMF (3 ml) was added N,N′-diisopropylcarbodiimide (0.166 ml, 1.07 mmol) dropwise and the reaction mixture was stirred at room temperature for 6h. The reaction mixture was concentrated and the residue was dissolved in DMSO and purified by reverse phase chromatography [water/acetonitrile (0.1% TFA)] from 10% followed by a gradient from 20 to 80%. Pure fractions were combined to give perfluorophenyl 6-(((S)-1-(((S)-1-((4-((((5-(2-amino-3-pentylquinolin-5-yl)pentyl)carbamoyl)oxy)methyl)phenyl)amino)-1-oxopropan-2-yl)amino)-3-methyl-1-oxobutan-2-yl)amino)-6-oxohexanoate 2,2,2-trifluoroacetate (122 mg) as a white solid. ¹H NMR (DMSO-d⁶) δ 13.5 (s, 1H), 9.92 (s, 1H), 8.35 (bs, 3H), 8.17 (d, J=7.0 Hz, 1H), 7.87 (d, J=7.0 Hz, 1H), 7.64-7.52 (m, 4H), 7.32-7.18 (m, 4H), 4.91 (s, 2H), 4.37 (t, J=7.0 Hz, 1H), 4.19 (t, J=7.0 Hz, 1H), 3.60-3.50 (m, 4H), 2.97 (m, 4H), 2.79 (t, J=7.0 Hz, 2H), 2.74 (t, J=7.0 Hz, 2H), 2.31-2.22 (m, 2H), 1.96 (q, J=7.0 Hz, 1H), 1.71-1.51 (m, 8H), 1.45-1.38 (m, 2H), 1.40-1.27 (m, 9H), 0.90-0.80 (m, 9H). LCMS [M+H]=913.4.

[0644] The following compounds in TABLE 23 can be prepared using a method similar to that described in above for ATAC8.

TABLE 23

| Compound | Structure | Name | M + 1 |
|---|---|---|---|
| ATAC9 | [chemical structure] | perfluorophenyl 7- (((S)-1-(((S)- 1-((4-(((((4- amino-1-(2- hydroxy-2- methylpropyl)-1H- imidazo[4,5-c] quinolin-2- yl)methyl)(ethyl) | 941 |
| | | carbamoyl) | |
| | | oxy)methyl) | |
| | | phenyl)amino)-1- | |
| | | oxopropan-2- | |
| | | yl)amino)-3- | |
| | | methyl-1- | |
| | | oxobutan-2-yl)amino)- | |
| | | 7-oxoheptanoate | |
| ATAC10 | [chemical structure] | perfluorophenyl 7-(((S)-1-(((S)- 1-((4-(((((4- amino-1-(2- hydroxy-2- methylpropyl)- 1H-imidazo[4,5-c] quinolin-2- yl)methyl)(ethyl) carbamoyl) oxy)methyl)phenyl) amino)-1-oxo-5- ureidopentan-2-yl) | 1027 |
| | | amino)-3- | |
| | | methyl-1-oxobutan- | |
| | | 2-yl)amino)- | |
| | | 7-oxoheptanoate | |

### Example 6

### Synthesis of ATAC11

[0645] This example shows the synthesis of N-((4-amino-1-(2-hydroxy-2-methylpropyl)-1H-imidazo[4,5-c]quinolin-2-yl)methyl)-1-(3-(2,5-dioxo-2,5-dihydro-1H-pyrrol-1-yl)propanamido)-N-ethyl-3,6,9,12-tetraoxapentadecan-15-amide (ATAC11).

[chemical structure]

### Step A: Preparation of ATAC11

[chemical structure]

[0647] A solution of MAL-PEG4-acid (265.7 mg, 0.638 mmol) and N,N′-dicyclohexylcarbodiimide (DCC, 144.8 mg, 0.702 mmol) in dry dichloromethane/acetonitrile (1:1, 5 mL) was stirred at room temperature for 1h, followed by addition of compound 1 (100 mg, 0.319 mmol) in one portion. After 72h of stirring, volatile organics were removed under vacuum. The residue obtained was purified by flash column chromatography on silica gel, eluting with step gradients of methanol in dichloromethane at a ratio of v/v 1:20, 1:15, and 1:9, to afford the target product N-((4-amino-1-(2-hydroxy-2-methylpropyl)-1H-imidazo[4,5-c]quinolin-2-yl)methyl)-1-(3-(2,5-dioxo-2,5-dihydro-1H-pyrrol-1-yl)propanamido)-N-ethyl-3,6,9,12-tetraoxapentadecan-15-amide (80 mg, 35% yield) as white colored foamy solid oil. ¹H NMR (300 MHz, CDCl₃) δ 8.40-7.82 (br m, 1H), 7.74 (d, J=8.1 Hz, 1H), 7.44 (t, J=7.5 Hz, 1H), 7.30 (t, J=7.4 Hz, 1H), 6.76-6.28 (br m, 2H), 4.82-4.32 (br m, 2H), 4.08-3.64 (br m, 6H), 3.54 (br s, 14H), 3.31 (br s, 3H), 2.63 (br s, 2H), 2.38 (t, J=6.9 Hz, 2H), 1.27 (br s, 4H), 1.20-0.68 (br m, 5H). MS (ESI+) m/z 712 (M+1), 734 (M+Na).

### Example 7

### Synthesis of ATAC12, ATAC13, ATAC14, ATAC15, ATAC16, ATAC17, ATAC18, ATAC19, ATAC20, and ATAC21

[0648] This example shows the synthesis of N-(5-(2-amino-3-pentylquinolin-5-yl)pentyl)-1-(3-(2,5-dioxo-2,5-dihydro-1H-pyrrol-1-yl)propanamido)-3,6,9,12-tetraoxapentadecan-15-amide (ATAC12), 1-(3-(2,5-dioxo-2,5-dihydro-1H-pyrrol-1-yl)propanamido)-N-(3-pentylquinolin-2-yl)-3,6,9,12-tetraoxapentadecan-15-amide (ATAC13), 1-(3-(2,5-dioxo-2,5-dihydro-1H-pyrrol-1-yl)propanamido)-N-(1-isobutyl-1H-imidazo[4,5-c]quinolin-4-yl)-3,6,9,12-tetraoxapentadecan-15-amide (ATAC14), 1-(3-(2,5-dioxo-2,5-dihydro-1H-pyrrol-1-yl)propanamido)-N-methyl-N-(2-(3-(7-methylbenzo[1,2-d:3,4-d′]bis(thiazole)-2-yl)ureido)ethyl)-3,6,9,12-tetraoxapentadecan-15-amide (ATAC15), (S)-1-(3-(2,5-dioxo-2,5-dihydro-1H-pyrrol-1-yl)propanamido)-N-(1-((7-methylbenzo[1,2-d:3,4-d′]bis(thiazole)-2-yl)amino)-1-oxo-3-phenylpropan-2-yl)-3,6,9,12-tetraoxapentadecan-15-amide (ATAC16), N-(benzo[d]thiazol-2-yl)-1-(3-(2,5-dioxo-2,5-dihydro-1H-pyrrol-1-yl)propanamido)-N-((8-hydroxyquinolin-7-yl)(4-(trifluoromethoxy)phenyl)methyl)-3,6,9,12-tetraoxapentadecan-15-amide (ATAC17), N-((2R,3R,3aS,7aR,9R,10R,10aS,14aR)-2,9-bis(2-amino-6-oxo-1H-purin-9(6H)-yl)-5,10,12-trihydroxy-5,12-dioxidodecahydrodifuro[3,2-d:3′,2′-j][1,3,7,9,2,8]tetra-oxadiphosphacyclododecin-3-yl)-1-(3-(2,5-dioxo-2,5-dihydro-1H-pyrrol-1-yl)propanamido)-3,6,9,12-tetraoxapentadecan-15-amide (ATAC18), N-((2R,3R,3aS,7aR,9R,10R,10aS,14aR)-2,9-bis(2-amino-6-oxo-1H-purin-9(6H)-yl)-10-hydroxy-5,12-dimercapto-5,12-dioxidodecahydrodifuro[3,2-d:3′,2′-j][1,3,7,9,2,8]tetraoxadiphosphacyclododecin-3-yl)-1-(3-(2,5-dioxo-2,5-dihydro-1H-pyrrol-1-yl)propanamido)-3,6,9,12-tetraoxapentadecan-15-amide (ATAC19), N-(9-((2R,3R,3aS,7aR,9R,10R,10aS,14aR)-9-(2-amino-6-oxo-1H-purin-9(6H)-yl)-3,5,10,12-tetrahydroxy-5,12-dioxidodecahydrodifuro[3,2-d:3′,2′-j][1,3,7,9,2,8]tetra-oxadiphosphacyclododecin-2-yl)-9H-purin-6-yl)-1-(3-(2,5-dioxo-2,5-dihydro-1H-pyrrol-1-yl)propanamido)-3,6,9,12-tetraoxapentadecan-15-amide (ATAC20), and N-(9-((2R,3R,3aS,7aR,9R,10R,10aS,14aR)-9-(2-amino-6-oxo-1H-purin-9(6H)-yl)-3,5,10,12-tetrahydroxy-5,12-dioxidodecahydrodifuro[3,2-d:3′,2′-j][1,3,7,9,2,8]tetraoxadiphosphacyclododecin-2-yl)-9H-purin-6-yl)-1-(3-(2,5-dioxo-2,5-dihydro-1H-pyrrol-1-yl)propanamido)-3,6,9,12-tetraoxapentadecan-15-amide (ATAC21).

[chemical structure]

### Step A: Preparation of ATAC12

[chemical structure]

[0650] To a stirred solution containing 100 mg (0.33 mmol) of 5-(5-aminopentyl)-3-pentylquinolin-2-amine in 13 mL of CH₂Cl₂ under N₂ was added a solution of MAL-PEG4-NHS [CAS No 756525-99-2] (171 mg, 0.33 mmol) in 3 mL of CH₂Cl₂ by syringe pump over 90 mins. The reaction mixture was stirred at room temperature for 16h then evaporated to afford a residue which was purified by silica gel chromatography (CombiFlash Gold (12g): CH₂Cl₂/CH₃OH/NH₄OH) to afford a light yellow syrup which was dissolved in 5 mL of CH₃CN and lyophilized to provide 164 mg of the desired compound. ¹H NMR (CD₃OD) δ 7.95 (s, 1H), 7.38 (s, 1H), 7.37 (s, 1H), 7.07 (t, J=8.5 Hz, 1H), 6.78 (s, 2H), 3.75 (t, J=6.0 Hz, 2H), 3.65 (t, J=6.0 Hz, 2H), 3.59-3.52 (m, 12H), 3.46 (t, J=5.5 Hz, 2H), 3.28 (t, J=7.5 Hz, 2H), 3.18 (t, J=7.5 Hz, 2H), 2.98 (t, J=8.5 Hz, 2H), 2.67 (t, J=7.5 Hz, 2H), 2.44 (t, J=7.0 Hz, 2H), 2.40 (t, J=7.0 Hz, 2H), 1.76-1.68 (m, 4H), 1.58-1.52 (m, 2H), 1.46-1.40 (m, 6H), 0.94 (t, J=7.0 Hz, 3H). (MS (ESI+) m/z 698 (M+1).

[0651] The following compounds in TABLE 24 can be prepared using a method similar to that as described above for ATAC12.

TABLE 24

| Compound | Structure | Name | M + 1 |
|---|---|---|---|
| ATAC13 | [chemical structure] | 1-(3-(2,5-dioxo- 2,5-dihydro-1H- pyrrol-1-yl) propanamido)- N-(3-pentyl- quinolin- 2-yl)-3,6,9,12- tetraoxapenta- decan-15-amide | 613 |
| ATAC14 | [chemical structure] | 1-(3-(2,5-dioxo- 2,5-dihydro-1H- pyrrol-1-yl) propanamido)- N-(1-isobutyl- 1H-imidazo[4,5- c]quinolin-4-yl)- 3,6,9,12- tetraoxapenta- decan-15-amide | 639 |
| ATAC15 | [chemical structure] | 1-(3-(2,5-dioxo- 2,5-dihydro-1H- pyrrol-1-yl) propanamido)-N- methyl-N-(2-(3- (7-methylbenzo | 720 |
| | | [1,2-d:3,4- | |
| | | d′]bis(thiazole)- | |
| | | 2-yl)ureido)ethyl)- | |
| | | 3,6,9,12-tetra- | |
| | | oxapentadecan-15- | |
| | | amide | |
| ATAC16 | [chemical structure] | (S)-1-(3-(2,5- dioxo-2,5- dihydro-1H- pyrrol-1-yl) propanamido)- N-(1-((7- methylbenzo [1,2-d:3,4- d′]bis(thiazole)- 2-yl)amino)-1- oxo-3- phenylpropan- 2-yl)-3,6,9,12- | 635 |
| | | tetraoxapenta- | |
| | | decan-15-amide | |
| ATAC17 | [chemical structure] | N-(benzo[d] thiazol-2-yl)- 1-(3-(2,5-dioxo- 2,5-dihydro-1H- pyrrol-1-yl) propanamido)- N-((8- hydroxyquinolin- 7-yl)(4- (trifluoromethoxy) phenyl)methyl)- 3,6,9,12- tetraoxapenta- decan-15- amide | 734 |
| ATAC18 | [chemical structure] | N- ((2R,3R,3aS,7aR, 9R,10R,10aS,14aR)- 2,9-bis(2-amino- 6-oxo-1H-purin- 9(6H)-yl)-5,10,12- trihydroxy-5,12- dioxidodeca- hydrodifuro[3,2- d:3′,2′-j] [1,3,7,9,2,8]tetra- oxadiphospha- cyclododecin-3-yl)- | 1088 |
| | | 1-(3-(2,5-dioxo- | |
| | | 2,5-dihydro-1H- | |
| | | pyrrol-1-yl) | |
| | | propanamido)- | |
| | | 3,6,9,12- | |
| | | tetraoxapenta- | |
| | | decan-15-amide | |
| ATAC19 | [chemical structure] | N- ((2R,3R,3aS,7aR, 9R,10R,10aS, 14aR)-2,9-bis(2- amino-6-oxo-1H- purin-9(6H)-yl)- 10-hydroxy-5,12- dimercapto-5,12- dioxidodeca- hydrodifuro[3,2- d:3′,2′-j] [1,3,7,9,2,8] tetraoxadiphospha- | 1120 |
| | | cyclododecin-3- | |
| | | yl)-1-(3-(2,5-dioxo- | |
| | | 2,5-dihydro-1H- | |
| | | pyrrol-1-yl) | |
| | | propanamido)- | |
| | | 3,6,9,12- | |
| | | tetraoxapenta- | |
| | | decan-15-amide | |
| ATAC20 | [chemical structure] | N-(9- ((2R,3R,3aS,7aR, 9R,10R,10aS,14 aR)-9-(2-amino- 6-oxo-1H-purin- 9(6H)-yl)- 3,5,10,12- tetrahydroxy- 5,12-dioxidodeca- hydrodifuro[3,2- d:3′,2′-j] [1,3,7,9,2,8]tetra- oxadiphospha- cyclododecin-2- | 1073 |
| | | yl)-9H-purin-6- | |
| | | yl)-1-(3-(2,5- | |
| | | dioxo-2,5-dihydro- | |
| | | 1H-pyrrol-1-yl) | |
| | | propanamido)- | |
| | | 3,6,9,12- | |
| | | tetraoxapenta- | |
| | | decan-15-amide | |
| ATAC21 | [chemical structure] | N-(9- ((2R,3R,3aS,7aR, 9R,10R,10aS, 14aR)-9-(2-amino- 6-oxo-1H-purin- 9(6H)-yl)-3,5, 10,12-tetrahydroxy- 5,12-dioxidodeca- hydrodifuro[3,2- d:3′,2′-j] [1,3,7,9,2,8] tetraoxadiphospha- cyclododecin-2- yl)-9H-purin-6-yl)- | 1073 |
| | | 1-(3-(2,5-dioxo- | |
| | | 2,5-dihydro-1H- | |
| | | pyrrol-1-yl) | |
| | | propanamido)- | |
| | | 3,6,9,12- | |
| | | tetraoxapenta- | |
| | | decan-15-amide | |

### Example 8

### Synthesis of ATAC22, ATAC23, ATAC24, ATAC25, ATAC26, ATAC27, ATAC28, ATAC29, ATAC30, and ATAC31

[0652] This example shows the synthesis of 4-((S)-2-((S)-2-(6-(2,5-dioxo-2,5-dihydro-1H-pyrrol-1-yl)hexanamido)-3-methylbutanamido)propanamido)benzyl ((4-amino-1-(2-hydroxy-2-methyl-propyl)-1H-imidazo[4,5-c]quinolin-2-yl)methyl)(ethyl)carbamate (ATAC22), 4-((S)-2-((S)-2-(6-(2,5-dioxo-2,5-dihydro-1H-pyrrol-1-yl)hexanamido)-3-methyl-butanamido)propanamido)benzyl (5-(2-amino-3-pentylquinolin-5-yl)pentyl)-carbamate (ATAC23), 4-((S)-2-((S)-2-(6-(2,5-dioxo-2,5-dihydro-1H-pyrrol-1-yl)hexanamido)-3-methylbutan-amido)-5-ureidopentanamido)benzyl-(5-(2-amino-3-pentylquinolin-5-yl)pentyl)-carbamate (ATAC24), 4-((S)-2-((S)-2-(6-(2,5-dioxo-2,5-dihydro-1H-pyrrol-1-yl)hexanamido)-3-methylbutanamido)-5-ureidopentanamido)benzyl((4-amino-1-(2-hydroxy-2-methylpropyl)-1H-imidazo[4,5-c]quinolin-2-yl)methyl)(ethyl)carbamate TFA salt (ATAC25), 2-(3-{2-[N-Methyl({p-[(S)-2-{(S)-2-[6-(2,5-dioxo-1H-pyrrol-1-yl)hexanoylamino]-3-methylbutyrylamino}-5-ureidovalerylamino]phenyl}methoxycarbonyl)amino]ethyl}ureido)-7-methyl-1,6-dithia-3,8-diaza-as-indacene (ATAC26), 2-{[(8-Hydroxy-7-quinolyl)(p-trifluoromethoxyphenyl)methyl] ({p-[(S)-2-{(S)-2-[6-(2,5-dioxo-1H-pyrrol-1-yl)hexanoylamino]-3-methylbutyrylamino}-5-ureidovalerylamino]phenyl}methoxycarbonyl)amino}-1,3-benzothiazole (ATAC27), (1R,6R,8R,9S,10S,15R,17R,18S)-18-({p-[(S)-2-{(S)-2-[6-(2,5-Dioxo-1H-pyrrol-1-yl)hexanoylamino]-3-methylbutyrylamino}-5-ureidovalerylamino]phenyl}methoxycarbonylamino)-8,17-bis(2-amino-6-oxo-1,9-dihydropurin-9-yl)-3,12-dihydroxy-9-hydroxy-2.4.7.11.13.16-hexaoxa-3λ5.12λ5-diphosphatricyclo[13.3.0.06,10]octadecane-3,12-dione (ATAC28), (1R,6R,8R,9S,10S,15R,17R,18S)-18-({p-[(S)-2-{(S)-2-[6-(2,5-Dioxo-1H-pyrrol-1-yl)hexanoylamino]-3-methylbutyrylamino}propionylamino]phenyl}methoxycarbonylamino)-8,17-bis(2-amino-6-oxo-1,9-dihydropurin-9-yl)-3,12-dihydroxy-9-hydroxy-2.4.7.11.13.16-hexaoxa-3λ5.12λ5-diphosphatricyclo[13.3.0.06,10]octadecane-3,12-dione (ATAC29), (1R,6R,8R,9S,10S,15R,17R,18S)-18-({p-[(S)-2-{(S)-2-[6-(2,5-Dioxo-1H-pyrrol-1-yl)hexanoylamino]-3-methylbutyrylamino}-5-ureidovalerylamino]phenyl}methoxycarbonylamino)-8,17-bis(2-amino-6-oxo-1,9-dihydropurin-9-yl)-9-hydroxy-3,12-dimercapto-2.4.7.11.13.16-hexaoxa-3λ5.12λ5-diphosphatricyclo[13.3.0.06,10]octadecane-3,12-dione (ATAC30), and {p-[(S)-2-{(S)-2-[6-(2,5-Dioxo-1H-pyrrol-1-yl)hexanoylamino]-3-methylbutyrylamino}-5-ureidovalerylamino]phenyl}methyl 9-{(1S,6R,8R,9S,10S,15R,17R,18S)-8-(2-amino-6-oxo-1,9-dihydropurin-9-yl)-3,12-dihydroxy-9,18-dihydroxy-3,12-dioxo-2.4.7.11.13.16-hexaoxa-3λ5.12λ5-diphosphatricyclo[13.2.1.06,10]octadec-17-yl}-9a-adenineecarboxylate (ATAC31).

[chemical structure]

### Step A: Preparation of ATAC22

[chemical structure]

[0654] A solution of compound 1 (150 mg, 0.479 mmol) and N,N′-diisopropylethylamine (145.4 mg, 1.437 mmol) in dry DMF was stirred at room temperature for 5 min., followed by addition of maleimidocaproyl-valine-alanine-p-aminobenzyl alcohol p-nitrophenyl-carbonate (MC-Val-Ala-PAB-PNP, 343.6 mg, 0.527 mmol). After stirring for 24 h, volatile organics were removed under vacuum. The residue obtained was triturated with dry acetonitrile. The precipitated solid was collected by filtration, washed with acetonitrile and dried under vacuum to obtain unreacted MC-Val-Ala-PAB-PNP (130 mg) as beige solid. The filtrate and washings were combined and concentrated under vacuum. The residue obtained was purified by flash column chromatography on silica gel, eluting with step gradients of MeOH in dichloromethane at a ratio of v/v 1:20, 1:15, and 1:10, to afford the target product mc-Val-Ala-PAB-GDQ (70 mg, 18% yield) as beige colored foamy solid. ¹H NMR (DMSO-d⁶) δ 10.1-9.75 (br m, 1H), 8.58-8.24 (br m, 1H), 8.15 (d, J=6.6 Hz, 1H), 8.01 (br s, 1H), 7.81 (d, J=8.4 Hz, 1H), 7.71 (d, J=8.4 Hz, 1H), 7.65-7.48 (m, 2H), 7.46-7.34 (m, 2H), 7.29 (br s, 1H), 7.18 (br s, 1H), 6.99 (s, 2H), 5.03 (br s, 2H), 4.96 (br s, 1H), 4.72 (br s, 1H), 4.48-4.26 (m, 1H), 4.26-4.04 (m, 1H), 2.22-2.02 (m, 2H), 2.02-1.80 (m, 1H), 1.58-1.37 (m, 4H), 1.36-0.92 (br m, 15H), 0.92-0.53 (br m, 7H). MS (ESI+) m/z 826 (M+1).

[0655] The following ATAC30, ATAC31, ATAC32, ATAC33, ATAC34, ATAC35, ATAC36, ATAC37, ATAC38, ATAC39, ATAC40, ATAC41, and ATAC42 are prepared using a method similar to that described above for ATAC29.

### ATAC23: 4-((S)-2-((S)-2-(6-(2,5-dioxo-2,5-dihydro-1H-pyrrol-1-yl)hexanamido)-3-methyl-butanamido)propanamido)benzyl (5-(2-amino-3-pentylquinolin-5-yl)pentyl)-carbamate

[chemical structure]

[0657] ¹H NMR (CD₃OD) δ 8.35 (s, 1H), 7.63 (t, J=8.5 Hz, 1H), 7.55 (d, J=8.0 Hz, 1H), 7.47 (d, J=8.0 Hz, 1H), 7.33 (d, J=8.0 Hz, 1H), 7.27 (d, J=8.0 Hz, 1H), 6.78 (s, 2H), 5.00 (s, 2H), 4.46 (q, J=7.0 Hz, 2H), 4.13 (d, J=7.0 Hz, 1H), 3.47-3.4 (m, 3H), 3.17 (t, J=7.0 Hz, 2H), 3.05 (t, J=7.0 Hz, 2H), 2.75 (t, J=7.5 Hz, 2H), 2.27 (t, J=7.5 Hz, 2H), 2.07 (q, J=7.0 Hz, 1H), 1.72-1.51 (m, 10H), 1.46-1.35 (m, 8H), 1.32-1.26 (m, 3H), 1.00-0.92 (m, 9H). LCMS [M+H]=812.4.

### ATAC24: 4-((S)-2-((S)-2-(6-(2,5-dioxo-2,5-dihydro-1H-pyrrol-1-yl)hexanamido)-3-methylbutan-amido)-5-ureidopentanamido)benzyl-(5-(2-amino-3-pentylquinolin-5-yl)pentyl)-carbamate

[chemical structure]

[0659] ¹H NMR (DMSO-d⁶) δ 13.5 (bs, 1H), 10.0 (s, 1H), 8.40 (m, 3H), 8.07 (d, J=7.5 Hz, 1H), 7.80 (d, J=8.5 Hz, 1H), 7.6-7.5 (m, 4H), 7.35-7.25 (m, 2H), 6.01 (m, 1H), 5.42 (s, 1H), 4.89 (s, 2H), 4.41 (q, J=7.0 Hz, 1H), 4.18 (t, J=7.0 Hz, 1H), 3.10-2.90 (m, 6H), 2.75 (t, J=7.5 Hz, 2H), 2.27 (t, J=7.5 Hz, 2H), 2.07 (q, J=7.0 Hz, 1H), 1.72-1.51 (m, 10H), 1.46-1.35 (m, 8H), 1.32-1.26 (m, 3H), 1.00-0.92 (m, 9H). LCMS [M+H]=898.

### ATAC25: 4-((S)-2-((S)-2-(6-(2,5-dioxo-2,5-dihydro-1H-pyrrol-1-yl)hexanamido)-3-methylbutanamido)-5-ureidopentanamido)benzyl((4-amino-1-(2-hydroxy-2-methylpropyl)-1H-imidazo[4,5-c]quinolin-2-yl)methyl)(ethyl)carbamate TFA salt

[chemical structure]

[0661] ¹H NMR (DMSO-d⁶) δ 13.4 (bs, 1H), 9.99-9.89 (br m, 1H), 9.09-8.40 (m, 3H), 8.07 (d, J=7.5 Hz, 1H), 7.80 (d, J=8.5 Hz, 1H), 7.68 (t, J=8.0 Hz, 1H), 7.59 (bs, 1H), 7.51 (t, J=8.5 Hz, 1H), 7.46-7.14 (m, 2H), 7.00 (s, 1H), 5.99 (br s, 1H), 5.05 (br s, 1H), 4.95 (br s, 1H), 4.37 (q, J=7.0 Hz, 1H), 4.18 (t, J=7.0 Hz, 1H), 3.37 (t, J=7.0 Hz, 2H), 3.03-2.93 (m, 2H), 2.22-2.07 (m, 2H), 1.99-1.92 (m, 1H), 1.75-1.05 (br m, 20H), 0.85 (d, J=8.5 Hz, 3H), 0.81 (d, J=8.5 Hz, 3H). MS (ESI+) m/z 912.5 (M+1).

TABLE 25

| Compound | Structure | Name | M + 1 |
|---|---|---|---|
| ATAC26 | [chemical structure] | 2-(3-{2-[N-Methyl ({p-[(S)-2-{(S)-2- [6-(2,5-dioxo- 1H-pyrrol-1-yl) hexanoylamino]-3- methylbutyryl- amino}-5- ureidovaleryl- amino]phenyl} methoxycarbonyl) amino]ethyl} | 921 |
| | | ureido)-7- | |
| | | methyl-1,6-dithia- | |
| | | 3,8-diaza-as-indacene | |
| ATAC27 | [chemical structure] | 2-{[(8-Hydroxy- 7-quinolyl)(p- trifluoromethoxy- phenyl)methyl] ({p-[(S)-2-{(S)- 2-[6-(2,5-dioxo- 1H-pyrrol-1- yl)hexanoylamino]- 3-methylbutyryl- amino}-5- ureidovalerylamino] phenyl}methoxy- carbonyl) amino}-1,3- benzothiazole | 1067 |
| ATAC28 | [chemical structure] | (1R,6R,8R,9S,10S, 15R,17R,18S)-18- ({p-[(S)-2-{(S)-2-[6- (2,5-Dioxo-1H- pyrrol-1- yl)hexanoylamino]- 3-methylbutyryl- amino}-5- ureidovaleryl- amino]phenyl} methoxycarbonyl amino)-8,17-bis (2-amino-6-oxo- | 1289 |
| | | 1,9-dihydropurin- | |
| | | 9-yl)-3,12- | |
| | | dihydroxy-9-hydroxy- | |
| | | 2.4.7.11.13.16- | |
| | | hexaoxa-3λ5.12λ5- | |
| | | diphosphatricyclo | |
| | | [13.3.0.06,10] | |
| | | octadecane-3,12- | |
| | | dione | |
| ATAC29 | [chemical structure] | (1R,6R,8R,9S,10S, 15R,17R,18S)-18- ({p-[(S)-2-{(S)-2-[6- (2,5-Dioxo-1H- pyrrol-1-yl) hexanoylamino]- 3-methylbutyryl- amino}propionyl- amino]phenyl} methoxycarbonyl- amino)-8,17- bis(2-amino-6- oxo-1,9-dihydro- | 1203 |
| | | purin-9-yl)-3,12- | |
| | | dihydroxy-9- | |
| | | hydroxy- | |
| | | 2.4.7.11.13.16- | |
| | | hexaoxa-3λ5.12λ5- | |
| | | diphosphatricyclo | |
| | | [13.3.0.06,10] | |
| | | octadecane-3,12- | |
| | | dione | |
| ATAC30 | [chemical structure] | (1R,6R,8R,9S, 10S,15R,17R,18S)- 18-({p-[(S)- 2-{(S)-2-[6-(2,5- Dioxo-1H-pyrrol-1- yl)hexanoylamino]- 3-methylbutyryl- amino}-5- ureidovalerylamino] phenyl}methoxy- carbonyl amino)-8,17- bis(2-amino-6-oxo- | 1321 |
| | | 1,9-dihydropurin-9- | |
| | | yl)-9-hydroxy-3,12- | |
| | | dimercapto- | |
| | | 2.4.7.11.13.16- | |
| | | hexaoxa-3λ5.12λ5- | |
| | | diphosphatricyclo | |
| | | [13.3.0.06,10] | |
| | | octadecane- | |
| | | 3,12-dione | |
| ATAC31 | [chemical structure] | {p-[(S)-2-{(S)-2- [6-(2,5-Dioxo-1H- pyrrol-1- yl)hexanoylamino]- 3-methylbutyryl- amino}-5- ureidovaleryl- amino]phenyl} methyl 9- {(1S,6R,8R,9S, 10S,15R,17R,18S)- 8-(2-amino-6-oxo- 1,9-dihydropurin- 9-yl)-3,12- | 1274 |
| | | dihydroxy-9,18- | |
| | | dihydroxy-3,12- | |
| | | dioxo- | |
| | | 2.4.7.11.13.16- | |
| | | hexaoxa-3λ5.12λ5- | |
| | | diphosphatricyclo | |
| | | [13.2.1.06,10] | |
| | | octadec-17- | |
| | | yl}-9a-adeninee- | |
| | | carboxylate | |

### Example 9

### Synthesis of ATAC32

[0662] This example shows the synthesis of 1-{6-[({7-Amino-3-(2-hydroxy-2-methylpropyl)-3.5.8-triazatricyclo[7.4.0.02,6]trideca-1(9),2(6),4,7,10,12-hexaen-4-yl}methyl)-N-ethylamino]-6-oxohexyl}-1H-pyrrole-2,5-dione (ATAC32).

[chemical structure]

### Step A: Preparation of ATAC32

[chemical structure]

[0664] To an ice-cold solution of 6-(2,5-dioxo-2,5-dihydro-1H-pyrrol-1-yl)hexanoic acid (0.034 g, 0.16 mmol) in DCM (0.800 ml) was added 1-chloro-N,N,2-trimethylprop-1-en-1-amine (0.021 mL, 0.160 mmol) dropwise. This was stirred at 0° C. for 1h then added to an ice-cold mixture of compound 1 (50 mg, 0.160 mmol) and triethylamine (66.7 μL, 0.479 mmol) in DCM (800 μL). Overall molarity 0.1 M. The mixture was stirred to room temperature overnight and then chromatographed (DCM to 20% MeOH/DCM) without work-up. Fractions containing product were pooled and evaporated then dissolved in 1 mL of acetonitrile and treated with 0.1 mL of trifluoroacetic acid. The resulting material was evaporated to an oil then redissolved in CH₃CN and lyophilized the sample to give ATAC32 (65 mg) as a white solid. ¹H NMR (400 MHz, (DMSO-d⁶) δ 13.3 (s, 1H), 8.54-8.50 (m, 3H), 7.81 (d, J=8.5 Hz, 1H), 7.76 (d, J=7.5 Hz, 1H), 7.51 (d, J=7.5 Hz, 1H), 6.99 (s, 1H), 6.95 (s, 1H), 3.51 (q, J=7.0 Hz, 2H), 3.43-3.31 (m, 3H), 2.36-2.30 (m, 2H), 1.54-1.41 (m, 4H), 1.25-1.00 (m, 10H). ¹⁹F NMR (DMSO-d⁶) 8-74.0. LCMS [M+H]⁺=507.1.

### Example 10

### Synthesis of ATAC33

[0665] This example shows the synthesis of 1-{[4-({6-[({7-Amino-3-(2-hydroxy-2-methylpropyl)-3.5.8-triazatricyclo[7.4.0.02,6]trideca-1(9),2(6),4,7,10,12-hexaen-4-yl}methyl)-N-ethylamino]-6-oxohexylamino}carbonyl)cyclohexyl]methyl}-1H-pyrrole-2,5-dione (ATAC33).

[chemical structure]

### Step A: Preparation of ATAC33

[chemical structure]

[0667] To a stirred solution of 1-(4-amino-2-((ethylamino)methyl)-1H-imidazo[4,5-c]quinolin-1-yl)-2-methylpropan-2-ol (100 mg, 0.319 mmol) in DCM (10 mL) under nitrogen was added via a syringe pump a solution of 2,5-dioxopyrrolidin-1-yl 6-(4-((2,5-dioxo-2,5-dihydro-1H-pyrrol-1-yl)methyl)cyclohexane-1-carboxamido)hexanoate (143 mg, 0.319 mmol) in DCM (5 mL) over a period of 3.5 h. The reaction mixture was stirred at room temperature overnight. The reaction mixture was concentrated and the residue was purified by reverse phase column chromatography. Pure fractions identified by HPLC analysis were pooled and concentrated. The residue was lyophilized from CH₃CN to provide a white solid (52.8, mg) as the TFA salt of ATAC33 as a mixture of cis and trans isomers. ¹H NMR (400 MHz, (CD₃OD) δ 8.54 and 8.48 (d, J=8.3 Hz, 1H), 7.81-7.71 (m, 2H), 7.62-7.55 (m, 1H), 6.80 (s, 2H), 3.66 (q, J=7.0 Hz, 2H), 3.13 and 3.08 (t, J=7.0 Hz, 2H), 2.45 and 2.38 (t, J=7.5 Hz, 2H), 2.1-2.0 (m, 1H), 1.8-1.47 (m, 10H), 1.46-1.15 (m, 16H), 1.54-1.41 (m, 4H), 1.25-1.00 (m, 10H). LCMS [M+H]⁺=646.3.

### Example 11

### Synthesis of ATAC34

[0668] This example shows the synthesis of 1-[(4-{[({7-Amino-3-(2-hydroxy-2-methylpropyl)-3.5.8-triazatricyclo[7.4.0.02,6]trideca-1(9),2(6),4,7,10,12-hexaen-4-yl}methyl)-N-ethylamino]-carbonyl}cyclohexyl)methyl]-1H-pyrrole-2,5-dione (ATAC34).

[chemical structure]

### Step A: Preparation of ATAC34

[chemical structure]

[0670] To an ice-cold solution of (1r,4r)-4-((2,5-dioxo-2,5-dihydro-1H-pyrrol-1-yl)methyl)cyclohexane-1-carboxylic acid (82 mg, 0.346 mmol) in DCM (1728 μl) was added 1-chloro-N,N,2-trimethylprop-1-en-1-amine (50.3 μL, 0.380 mmol) dropwise. This was stirred at 0° C. for 1h then added to an ice-cold mixture of 1-(4-amino-2-((ethylamino)methyl)-1H-imidazo[4,5-c]quinolin-1-yl)-2-methylpropan-2-ol (100 mg, 0.319 mmol) and triethylamine (133 μl, 0.957 mmol) in 1.6 mL of DCM. The mixture became a yellow solution as it stirred overnight to room temp. The reaction was concentrated to dryness, redissolved in MeOH/CH₂Cl₂, silica gel was added, then the solvents evaporated. Chromatography (12 g Gold silica, DCM to 20% MeOH/DCM, dry load) gave a solid which was dissolved in CH₃CN, frozen and lyophilized to afford 170 mg of N-((4-((1-(dimethylamino)-2-methylprop-1-en-1-yl)amino)-1-(2-((1-(dimethylamino)-2-methyl-prop-1-en-1-yl)oxy)-2-methylpropyl)-1H-imidazo[4,5-c]quinolin-2-yl)methyl)-4-((2,5-dioxo-2,5-dihydro-1H-pyrrol-1-yl)methyl)-N-ethylcyclohexane-1-carboxamide which was subsequently dissolved in 50% aqueous MeCN containing 0. I1% TFA and heated in a microwave reactor at 150° C. for 60 min. The reaction mixture was cooled and the solvents were evaporated and chromatographed to give ATAC34 (72 mg) as a white solid. ¹H NMR (400 MHz, (DMSO-d⁶) δ 13.3 (s, 1H), 8.70-8.50 (m, 3H), 7.83-7.79 (m, 1H), 7.71-7.65 (m, 1H), 7.55-7.48 (m, 1H), 7.00 (s, 1H), 6.98 (s, 1H), 5.13 (bs, 1H), 4.83 (bs, 1H), 3.65 (q, J=7.0 Hz, 2H), 3.38 (m, 1H), 3.25 and 3.18 (d, J=6.5 Hz, 2H), 1.69-1.52 (m, 5H), 1.45-0.88 (m, 13H). ¹⁹F NMR (DMSO-d⁶) 8-73.7. LCMS [M+H]⁺=533.1.

### Example 12

### Determination of Kd Values

[0671] K_{d} is measured by a radiolabeled antigen binding assay (RIA) performed with the Fab version, bispecific antibody construct version, or the conjugate version comprising the antigen binding domain of interest, and its antigen as described by the following assay.

[0672] Solution binding affinity of Fabs, bispecific antibody constructs, or conjugates comprising the antigen binding domain for the antigen of interest is measured by equilibrating the Fab, bispecific antibody constructs, or conjugate with a minimal concentration of (¹²⁵I)-labeled antigen in the presence of a titration series of unlabeled antigen, then capturing bound antigen with an anti-Fab, anti-bispecific antibody construct, or anti-conjugate antibody-coated plate (See, e.g., Chen et al., J. Mol. Biol. 293:865-881 (1999)). To establish conditions for the assay, multi-well plates are coated overnight with 5 μg/mL of a capturing anti-Fab, anti-bispecific antibody construct, or anti-conjugate antibody (Cappel Labs) in 50 mM sodium carbonate (pH 9.6), and subsequently blocked with 2% (w/v) bovine serum albumin in PBS for two to five hours at room temperature (approximately 23° C.). In a non-adsorbent plate (Nunc #269620), 100 μM or 26 μM [¹²⁵I]-antigen are mixed with serial dilutions of a Fab, bispecific antibody construct, or conjugate of interest (e.g., consistent with assessment of the anti-VEGF antibody, Fab-12, in Presta et al., Cancer Res. 57:4593-4599 (1997)). The Fab, bispecific antibody construct, or conjugate of interest is then incubated overnight; however, the incubation may continue for a longer period (e.g., about 65 hours) to ensure that equilibrium is reached. Thereafter, the mixtures are transferred to the capture plate for incubation at room temperature (e.g., for one hour). The solution is then removed and the plate washed eight times with 0.1% polysorbate 20 (TWEEN-20®) in PBS. When the plates have dried, 150 μl/well of scintillant is added, and the plates are counted on a TOPCOUNT™ gamma counter (Packard) for ten minutes. Concentrations of each Fab, bispecific antibody construct, or conjugate that give less than or equal to 20% of maximal binding are chosen for use in competitive binding assays.

### Example 13

### Determination of Kd Values

[0673] K_{d} is measured using surface plasmon resonance assays using a BIACORE®-2000 or a BIACORE®-3000 (BIAcore, Inc., Piscataway, N.J.) at 25° C. with immobilized antigen CM5 chips at 10 response units (RU). Briefly, carboxymethylated dextran biosensor chips (CM5, BIACORE, Inc.) are activated with N-ethyl-N′-(3-dimethylaminopropyl)-carbodiimide hydrochloride (EDC) and N-hydroxysuccinimide (NHS) according to the supplier's instructions. Antigen is diluted with 10 mM sodium acetate, pH 4.8, to 5 μg/mL (0.2 μM) before injection at a flow rate of 5 μL/minute to achieve approximately 10 response units (RU) of coupled protein. Following the injection of antigen, 1 M ethanolamine is injected to block unreacted groups. For kinetics measurements, two-fold serial dilutions of Fab, bispecific antibody construct, or conjugate (0.78 nM to 500 nM) are injected in PBS with 0.05% polysorbate 20 (TWEEN-20™) surfactant (PBST) at 25° C. at a flow rate of approximately 25 μL/min. Association rates (kₒₙ) and dissociation rates (k_{off}) are calculated using a simple one-to-one Langmuir binding model (BIACORE® Evaluation Software version 3.2) by simultaneously fitting the association and dissociation sensorgrams. The equilibrium dissociation constant (K_{d}) is calculated as the ratio k_{off}/kₒₙ. See, e.g., Chen et al., J. Mol. Biol. 293:865-881 (1999). If the on-rate exceeds 106 M-1 s-1 by the surface plasmon resonance assay above, then the on-rate can be determined by using a fluorescent quenching technique that measures the increase or decrease in fluorescence emission intensity (excitation=295 nm; emission=340 nm, 16 nm band-pass) at 25° C. of a 20 nM anti-antigen antibody (Fab form, bispecific form, or conjugate form) in PBS, pH 7.2, in the presence of increasing concentrations of antigen as measured in a spectrometer, such as a stop-flow equipped spectrophometer (Aviv Instruments) or a 8000-series SLM-AMINCO™ spectrophotometer (ThermoSpectronic) with a stirred cuvette.

### Example 14

### Lysine-Based Bioconjugation

[0674] The antibody was exchanged into an appropriate buffer, for example, phosphate, borate, PBS, or Tris-Acetate, at a concentration of about 2 mg/mL to about 10 mg/mL. An appropriate number of equivalents of the immune stimulatory compound-linker construct (ATAC) were added as a solution with stirring. Dependent on the physical properties of the immune stimulatory compound-linker construct, a co-solvent was introduced prior to the addition of the immune stimulatory compound-linker construct to facilitate solubility. The reaction was stirred at room temperature for 2 hours to about 12 hours depending on the observed reactivity. The progression of the reaction was monitored by LC-MS. Once the reaction was deemed complete, the remaining immune stimulatory compound-linker constructs were removed by applicable methods and the lysine-linked immune-stimulatory conjugate was exchanged into the desired formulation buffer.

[0675] Lysine-linked immune-stimulatory conjugates were synthesized starting with 10 mg of antibody (mAb) and 10 equivalents of ATAC1, ATAC2, ATAC3, ATAC4, ATAC5, ATAC6, ATAC7, ATAC8, ATAC9, or ATAC10 using the conditions described in Scheme 34 below (ADC=antibody immune-stimulatory compound conjugate; immune-stimulatory conjugate).

[chemical structure]

[chemical structure]

### Example 15

### Cysteine-Based Bioconjugation

[0676] The antibody was exchanged into an appropriate buffer, for example, phosphate, borate, PBS, or Tris-Acetate, at a concentration of about 2 mg/mL to about 10 mg/mL with an appropriate number of equivalents of a reducing agent, for example, dithiothreitol or tris(2-carboxyethyl)phosphine. The resultant solution was stirred for an appropriate amount of time and temperature to effect the desired reduction. The immune stimulatory compound-linker construct was added as a solution with stirring. Dependent on the physical properties of the immune stimulatory compound-linker construct, a co-solvent was introduced prior to the addition of the immune stimulatory compound-linker construct to facilitate solubility. The reaction was stirred at room temperature for about 1 hour to about 12 hours depending on the observed reactivity. The progression of the reaction was monitored by liquid chromatography-mass spectrometry (LC-MS). Once the reaction was deemed complete, the remaining free immune stimulatory compound-linker construct was removed by applicable methods and the conjugate was exchanged into the desired formulation buffer. Such cysteine-based conjugates can be synthesized starting with 10 mg of antibody (mAb) and 7 equivalents of ATAC11-ATAC34 using the conditions described in Scheme 35 below (ADC=antibody immune-stimulatory compound conjugates; immune-stimulatory conjugates). Monomer content and drug-antibody ratios can be determined by methods described in EXAMPLES 16-17.

[chemical structure]

[chemical structure]

### Example 16

### Determination of Molar Ratio

[0677] This example illustrates one method by which the molar ratio is determined. One microgram of conjugate is injected into an LC/MS such as an Agilent 6550 iFunnel Q-TOF equipped with an Agilent Dual Jet Stream ESI source coupled with Agilent 1290 Infinity UHPLC system. Raw data is obtained and is deconvoluted with software such as Agilent MassHunter Qualitative Analysis Software with BioConfirm using the Maximum Entropy deconvolution algorithm. The average mass of intact conjugates is calculated by the software, which can use top peak height at 25% for the calculation. This data is then imported into another program to calculate the molar ratio of the immune-stimulatory compound:conjugate, such as Agilent molar ratio calculator.

### Example 17

### Additional Method for Determination of Molar Ratio

[0678] Another method for determination of molar ratio is as follows. First, 10 μL of a 5 mg/mL solution of a conjugate is injected into an HPLC system set-up with a TOSOH TSKgel Butyl-NPR™ hydrophobic interaction chromatography (HIC) column (2.5 μM particle size, 4.6 mm×35 mm) attached. Then, over the course of 18 minutes, a method is run in which the mobile phase gradient is run from 100% mobile phase A to 100% mobile phase B over the course of 12 minutes, followed by a six minute re-equilibration at 100% mobile phase A. The flow rate is 0.8 mL/min and the detector is set at 280 nM. Mobile phase A is 1.5 M ammonium sulfate, 25 mM sodium phosphate (pH 7). Mobile phase B is 25% isopropanol in 25 mM sodium phosphate (pH 7). Post-run, the chromatogram is integrated and the molar ratio is determined by summing the weighted peak area.

### Example 18

### Generation of a Bispecific Anti-HER2×Anti-CD40 Recombinant Antibody Construct

[0679] The anti-CD40 single chain Fv (scFv) in the VH-VL orientation is fused to the C-terminus of the anti-HER2 heavy chain (VH—CH₁—CH₂—CH₃) (pertuzumab heavy chain) to generate the anti-HER2 VH—CH₁—CH₂—CH₃-anti-CD40 scFv heavy chain. This heavy chain is co-expressed with the light chain of anti-HER2 (VL-Ck) (pertuzumab light chain) in the transient CHO system in 180 mL of CHO media. The supernatant is harvested 7 days after the transfection and the bispecific antibody construct is purified over HiScreen MabSelect SuRe Protein A column on GE AKTA Pure machine. The bispecific anti-HER2×anti-CD40 antibody construct is recovered.

### Example 19

### Bispecific Anti-HER2×Anti-CD40 Recombinant Antibody Construct Binds to Human HER2 and Human CD40 Extracellular Domain with Similar Affinity as Parental Anti-HER2 Antibody and Parental Anti-CD40 Antibody

[0680] This example shows that the bispecific anti-HER2×anti-CD40 antibody construct binds to human HER2 and human CD40 extracellular domain (ECD).

[0681] The bispecific antibody constructs consisting of anti-HER2×anti-CD40 heavy chain and anti-HER2 light chain are co-expressed in the transient CHO system. The bispecific antibody was prepared as described in Example 18. The supernatant is harvested 7 days after transfection and the bispecific antibody construct was purified over HiScreen MabSelect SuRe Protein A column on GE AKTA Pure machine. Protein is analyzed for purity on Size Exclusion Chromatography using Agilent 1260 Infinity machine. Protein is recovered from 60 mL CHO transfection and is used for binding analysis. Analysis of human HER2 and CD40 ECD interactions are performed using Octet Red 96 instrument (ForteBio). The Octet systems use propriety BLI to analyze biomolecular interaction. Anti-HER2 parental antibody, anti-CD40 parental antibody and bispecific recombinant antibody construct are immobilized on anti-human Fc biosensors and incubated with varying concentration of monomeric human HER2 and human CD40 ECD ranging from 1.2 nM to 300 nM in PBS/0.1% BSA/0.02% Tween 20. The studies comprise 5 steps: (1) baseline acquisition (60 s); (2) loading of parental antibodies and bispecific recombinant antibody constructs onto an anti-human Fc biosensor (120 s); (3) second baseline acquisition (60 s); (4) association of interacting monomeric HER2 and CD40 ECD proteins for kₒₙ measurement (120 s); and (5) dissociation of interacting monomeric HER2 and CD40 ECD for k_{off} measurement (300 s). The interacting monomeric HER2 and CD40 ECDs are used at 6 concentrations of 3-fold concentration series. Data is analyzed using Octet Data Analysis Software 9.0 (ForteBio) and fitted to the 1:1 binding model. Equilibrium dissociation constants (K_{D}) are calculated by the ratio of kₒₙ to k_{off}. The binding of the bispecific anti-HER2×anti-CD40 antibody construct to HER2 and CD40 ECD are similar to the binding of the parental anti-HER2 antibody and anti-CD40 antibody.

### Example 20

### Bispecific Anti-HER2×Anti-CD40 Recombinant Antibody Construct Binds to Fcγ Receptors

[0682] This example shows that the bispecific anti-HER2×anti-CD40 antibody construct binds to human Fcγ receptors (FcγRs). The anti-HER2×anti-CD40 antibody was prepared as described in Example 18. Human FcγR interaction analysis was performed using an Octet Red 96 Instrument™. For human FcγRI and FcγRIIA interactions, the recombinant bispecific antibody was immobilized on anti-human Fc biosensors and incubated with varying concentration of monomeric FcγR ranging from 1.2 nM to 300 nM in PBS/0.1% BSA/0.02% Tween 20. The experiments were performed using five steps: (1) baseline acquisition (60 s); (2) bispecific construct loading onto anti-human Fc biosensor (120 s); (3) second baseline acquisition (60 s); (4) association of interacting FcγR for kₒₙ measurement (120 s); and (5) dissociation of interacting FcγR for k_{off} measurement (300 s). The interacting monomeric FcγRs are used at 4-6 concentrations of a 3-fold concentration series. The data were analyzed using Octet Data Analysis Software 9.0 (ForteBio)™ and fit to the 1:1 binding model. Equilibrium dissociation constants (K_{D}) are calculated by the ratio of kₒₙ to k_{off}.

[0683] For human FcγRIIIA F158 and FcγRIIIA V158 interaction studies, the FcγRs were immobilized on anti-His tag biosensors and incubated with varying concentrations of bispecific antibody ranging from 37 nM to 1 μM. The studies were performed using five steps: (1) Baseline acquisition (30 s); (2) human FcγRs loading to the anti-His tag biosensor (90 s); (3) second baseline acquisition (30 s); (4) association of interacting bispecific constructs for kₒₙ measurement (30 s); and (5) dissociation of interaction bispecific antibody constructs for k_{off} measurement (30 s). The interacting bispecific antibody constructs are used at 4 concentrations of a 3-fold concentration series. The data was analyzed using Octet Data Analysis Software 9.0 (ForteBio)™ and fit to the avidity binding model. Equilibrium dissociation constants (K_{D}) are calculated by the ratio of kₒₙ to k_{off}. The data are shown in TABLE 26 along with data for the control monospecific antibodies tested using the same protocol as just described. The bispecific anti-HER2×anti-CD40 antibody construct bound to the Fcγ receptors similarly to the antibody construct comprising the anti-HER2 IgG antibody.

TABLE 26
Binding affinity of recombinant antibody constructs targeting Her2/Neu and CD40

| | Hu CD40 | | Hu Her2 | huFcγR1 | huFcγR2A | huFcγR3 | huFcγR3 |
|---|---|---|---|---|---|---|---|
| | K_{D} | | K_{D} | K_{D} | K_{D} | F158 K_{D} | V158 K_{D} |
| Parental | 8.4 | nM | No binding | 0.7 nM | 27 nM | 0.86 uM | 0.51 uM |
| anti- | | | | | | | |
| CD40 | | | | | | | |
| antibody | | | | | | | |
| Parental | No binding | | 0.9 nM | 1.0 nM | 19 nM | 0.83 uM | 0.38 uM |
| anti- | | | | | | | |
| HER2 | | | | | | | |
| antibody | | | | | | | |
| Anti- | 13.3 | nM | 1.3 nM | 1.2 nM | 36 nM | 0.88 uM | 0.30 uM |

HER2 X
anti-
CD40 Fc
IgG1

Legend: nM = nanomolar

### Example 21

### Bispecific Anti-HER2×Anti-DEC205 IgG1 Antibody Construct Binds to Human HER2 and Human DEC205 Extracellular Domain with Similar Affinity as Parental Anti-HER2 Antibody and Parental Anti-DEC205 Antibody

[0684] This example shows that the anti-HER2×anti-DEC205 IgG1 bispecific antibody construct binds to human HER2 extracellular domain (ECD) and human DEC205 extracellular domain (ECD).

[0685] The bispecific antibody construct consisting of anti-HER2×anti-DEC205 IgG1 heavy chain and anti-HER2 light chain were co-expressed in the transient CHO system. The heavy chain comprised pertuzumab heavy chain having a DEC205 scFV attached at the C-terminal end. The light chain of pertuzumab was also used. The supernatant was harvested 7 days after transfection and the bispecific antibody construct was purified over HiScreen MabSelect SuRe Protein A column on GE AKTA Pure machine. Protein was analyzed for purity on Size Exclusion Chromatography using Agilent 1260 Infinity machine. 10.87 mg of protein was recovered from 60 mL CHO transfection and was used for binding analysis. Analysis of human HER2 and DEC205 ECD interactions were performed using Octet Red 96 instrument (ForteBio). The Octet systems use propriety BLI to analyze biomolecular interaction. Anti-HER2 parental antibody, anti-DEC205 parental antibody, and bispecific antibody constructs were immobilized on anti-human Fc biosensors and incubated with varying concentration of monomeric human HER2 ECD or human DEC205 ECD ranging from 1.2 nM to 300 nM in PBS/0.1% BSA/0.02% Tween 20. The studies were comprised of 5 steps: (1) baseline acquisition (60 s); (2) parental antibodies and bispecific antibody construct loading onto anti-human Fc biosensor (120 s); (3) second baseline acquisition (60 s); (4) association of interacting monomeric HER2 ECD and DEC205 ECD proteins for kₒₙ measurement (120 s); and (5) dissociation of interacting monomeric HER2 ECD and DEC205 ECD for k_{off} measurement (480-900 s). The interacting monomeric HER2 and DEC205 ECDs were used at 6 concentrations of 3-fold concentration series. Data were analyzed using Octet Data Analysis Software 9.0 (ForteBio) and fitted to the 1:1 binding model. Equilibrium dissociation constants (K_{D}) were calculated by the ratio of kₒₙ to k_{off}. The anti-HER2×anti-DEC205 bispecific antibody constructs demonstrated similar binding as the parental anti-HER2 antibody and weaker but sufficient binding as the parental anti-DEC205 as shown below in TABLE 27.

TABLE 27

| | Human HER2 | Human DEC205 |
|---|---|---|
| | K_{D} (nM) | K_{D} (nM) |
| Parental Anti-HER2 Antibody | 0.94 | No Binding |
| Parental Anti-DEC205 | No Binding | 0.85 |
| Antibody | | |
| Anti-HER2 × Anti-DEC205 | 0.72 | 12.2 |
| IgG1 Bispecific antibody | | |
| construct | | |

### Example 22

### Bispecific Anti-CEA×Anti-CD40 IgG1 Antibody Construct Binds to Human CEA and Human CD40 Extracellular Domain with Similar Affinity as Parental Anti-CEA Antibody and Parental Anti-CD40 Antibody

[0686] This example shows that the anti-CEA×anti-CD40 IgG1 bispecific antibody construct binds to human CEA extracellular domain (ECD) and human CD40 extracellular domain (ECD).

[0687] The bispecific antibody construct consisting of anti-CEA×anti-CD40 IgG1 heavy chain (prepared by attaching a CD40 scFC to the C terminus of the anti-CEA heavy chain) and anti-CEA light chain were co-expressed in the transient CHO system. The supernatant was harvested 7 days after transfection and the bispecific antibody construct was purified over HiScreen MabSelect SuRe Protein A column on GE AKTA Pure machine. Protein was analyzed for purity on Size Exclusion Chromatography using Agilent 1260 Infinity machine. 4.45 mg of protein was recovered from 30 mL CHO transfection and was used for binding analysis. Analysis of human CEA ECD or human CD40 ECD interactions were performed using Octet Red 96 instrument (ForteBio). The Octet systems use propriety BLI to analyze biomolecular interaction. Anti-CEA parental antibody, anti-CD40 parental antibody, and bispecific antibody constructs were immobilized on anti-human Fc biosensors and incubated with varying concentration of monomeric human CEA ECD or human CD40 ECD ranging from 1.2 nM to 300 nM in PBS/0.1% BSA/0.02% Tween 20. The studies were comprised of 5 steps: (1) baseline acquisition (60 s); (2) parental antibodies and bispecific antibody construct loading onto anti-human Fc biosensor (120 s); (3) second baseline acquisition (60 s); (4) association of interacting monomeric CEA ECD or CD40 ECD proteins for kₒₙ measurement (120 s); and (5) dissociation of interacting monomeric CEA ECD or CD40 ECD for k_{off} measurement (480-900 s). The interacting monomeric CEA ECDs or CD40 ECDs were used at 6 concentrations of 3-fold concentration series. Data were analyzed using Octet Data Analysis Software 9.0 (ForteBio) and fitted to the 1:1 binding model. Equilibrium dissociation constants (K_{D}) were calculated by the ratio of kₒₙ to k_{off}. The anti-CEA×anti-CD40 bispecific antibody construct demonstrated similar binding as the parental anti-CEA antibody and as the parental anti-CD40 antibody as shown below in TABLE 28.

TABLE 28

| | Human | |
|---|---|---|
| | CEA K_{D} (nM) | Human CD40 K_{D} (nM) |
| Parental Anti-CEA Antibody | 18.5 | No Binding |
| Parental Anti-CD40 Antibody | No Binding | 8.4 |
| Anti-CEA × anti-CD40 IgG1 | 23.7 | 10.0 |
| Bispecific antibody construct | | |

### Example 23

### Antibody Conjugates, Bispecific Antibody Constructs and Bispecific Conjugates Bind to Fcγ Receptors with Similar Affinity as Parental Controls

[0688] This example shows that antibody conjugates, bispecific mAbs and bispecific conjugates bind to Fcγ receptors with similar affinity as the parental controls. The analyses of Her2, Trop2, CEACAM5 (CEA), PD-L1, and ROR1 extracellular domain (ECD) interactions were performed using Octet Red 96 instrument (ForteBio). The Octet system uses propriety BLI to analyze biomolecular interactions.

[0689] The anti-HER2×anti-CD40 antibody was prepared as described in Example 18. Other bispecific antibodies were prepared by a similar procedure (attaching a CD40 scFc to the C terminal end of the heavy chain. Antibody conjugates and bispecific antibody conjugates were prepared by standard conjugation procedures, as described for example in Example 15. Unconjugated mono-/bispecific antibodies and antibody immune-stimulatory compound conjugates were immobilized on anti-human Fc biosensors and incubated with varying concentrations of monomeric human ECDs (Her2, Trop2, CEACAM5 (CEA), PD-L1, ROR1) ranging from 1.2 nM to 300 nM in PBS/1% BSA/0.2% Tween 20. The studies comprised 5 steps: (1) baseline acquisition (30 s); (2) unconjugated mono-/bispecific antibodies and antibody immune-stimulatory compound conjugates loading onto anti-human Fc biosensor (120 s); (3) second baseline acquisition (30 s); (4) association of interacting monomeric ECD proteins for kₒₙ measurement (120 s); and (5) dissociation of interacting monomeric ECDs for k_{off} measurement (240 s). The interacting monomeric ECDs were used at 5-6 concentrations of 3-fold concentration series. Data were analyzed using Octet Data Analysis Software 9.0 (ForteBio) and fitted to the 1:1 binding model. Equilibrium dissociation constants (K_{D}) were calculated by the ratio of kₒₙ to k_{off}. Data are shown in TABLE 29. The antibody immune-stimulatory compound conjugates had similar binding affinity (Kd) as unconjugated mono-/bispecific antibodies to monomeric human ECDs.

[0690] Human FcγR interaction analyses were also performed using Octet Red 96 instrument. For human FcγRI and FcγRIIA interactions, unconjugated mono-/bispecific antibodies or antibody immune-stimulatory compound conjugates were immobilized on anti-human Fc biosensors and incubated with varying concentrations of monomeric FcγRI or FcγRIIA protein ranging from 1.2 nM to 300 nM in PBS/1% BSA/0.2% Tween 20. The studies comprised 5 steps: (1) baseline acquisition (45 s); (2) mono-/bispecific antibodies and antibody immune-stimulatory compound conjugates loading onto anti-human Fc biosensor (120 s); (3) second baseline acquisition (45 s); (4) association of interacting FcγRs for kₒₙ measurement (90-120 s); and (5) dissociation of interacting FcγRs for k_{off} measurement (90-120 s). The interacting monomeric FcγRI and FcγRIIA proteins were used at 4-6 concentrations of 3-fold concentration series. Data were analyzed using Octet Data Analysis Software 9.0 (ForteBio) and fitted to the 1:1 binding model. Equilibrium dissociation constants (K_{D}) were calculated by the ratio of kₒₙ to k_{off}. Data are shown in TABLE 29. There were little to no changes in different antibody immune-stimulatory compound conjugate interactions with human FcγRI and FcγRIIA as compared to unconjugated mono-/bispecific antibody interactions with the respective FcγR monomeric proteins.

[0691] For human FcγRIIIA V176 interaction studies, the FcγRIIIA V176 protein was immobilized on anti-His tag biosensors and incubated with varying concentration of unconjugated mono-/bispecific antibodies or antibody immune-stimulatory compound conjugates ranging from 0.04 μM to 1 μM. This format was chosen because of weak interactions if antibodies were captured first and FcγRIIIA V176 protein added afterwards. The study comprised 5 steps: (1) baseline acquisition (45 s); (2) unconjugated mono-/bispecific antibodies or antibody immune-stimulatory compound conjugates loading onto anti-His tag biosensor (120 s); (3) second baseline acquisition (45 s); (4) association of interacting antibodies and antibody immune-stimulatory compound conjugates for kₒₙ measurement (60 s); and (5) dissociation of interacting antibodies and antibody immune-stimulatory compound conjugates for k_{off} measurement (60 s). The unconjugated mono-/bispecific antibodies or antibody immune-stimulatory compound conjugates were used at 4 concentrations of a 3-fold concentration series. Data were analyzed using Octet Data Analysis Software 9.0 (ForteBio) and fitted to the 1-1 binding model. Equilibrium dissociation constants (K_{D}) were calculated by the ratio of kₒₙ to k_{off}. Data are shown in TABLE 29. There were no changes in binding of the antibody immune-stimulatory compound conjugates with human FcγRIIIA V176 protein when compared to the parental unconjugated antibodies.

TABLE 29

| | | | huFcyRI | huFcyRIIA | huFcyRIIIA V176 |
|---|---|---|---|---|---|
| Antibody/Conjugate | huECDs (nM) | | (1-1, nM) | (1-1, nM) | (avidity, uM) |
| Parental anti-Her2 mAb | 1.4 | (Her2) | 1.1 | 11.1 | 0.26 |
| Anti-Her2 ATAC conjugate 1 | 1.7 | (Her2) | 1.3 | 17.8 | 0.37 |
| Anti-Her2 ATAC conjugate 2 | 1.6 | (Her2) | 1.5 | 14.3 | 0.33 |
| Anti-Her2 ATAC conjugate 3 | 1.9 | (Her2) | 1.3 | 9.1 | 0.34 |
| Her2 × CD40 bispecific | 1.9 | (Her2) | 1.2 | 26.9 | 0.22 |
| | 10.7 | (CD40) | | | |
| Her2 × CD40-ATAC conjugate 1 | 2.0 | (Her2) | 1.3 | 19.4 | 0.19 |
| | 9.5 | (CD40) | | | |
| Her2 × CD40-ATAC conjugate 2 | 2.0 | (Her2) | 1.9 | 14.5 | 0.14 |
| | 8.1 | (CD40) | | | |
| Parental anti-TROP2 mAb | 3.1 | (Trop2) | 1.6 | 12.0 | 0.45 |
| Anti-TROP2 ATAC conjugate 1 | 2.4 | (Trop2) | 2.3 | 19.4 | 0.47 |
| Anti-TROP2 ATAC conjugate 2 | 1.3 | (Trop2) | 1.8 | 16.1 | 0.39 |
| Anti-TROP2 ATAC conjugate 3 | 5.3 | (Trop2) | 1.6 | 26.3 | 0.54 |
| Trop2 × CD40 bispecific | 1.5 | (Trop2) | 0.9 | 15.0 | 0.21 |
| | 7.3 | (CD40) | | | |
| Trop2 × PDL1 bispecific | 2.1 | (Trop2) | 1.5 | 9.3 | 0.27 |
| | 3.5 | (PD-L1) | | | |
| Parental anti-CEACAM5 mAb | 1.9 | (CAM5) | 1.6 | 20.5 | 0.33 |
| Anti-CEACAM5 conjugate 4 | 2.5 | (CAM5) | 1.5 | 26.4 | 0.45 |
| Anti-CEACAM5 conjugate 5 | 2.5 | (CAM5) | 1.7 | 16.7 | 0.43 |
| Anti-PD-L1 mAb | 2.5 | (PD-L1) | 1.3 | 15.4 | 0.24 |
| Anti-PD-L1 ATAC conjugate 6 | 3.3 | (PD-L1) | 1.2 | 21.4 | 0.39 |
| Anti-ROR1 mAb | 2.6 | (ROR1) | 1.1 | 20.8 | 0.19 |
| ROR1 × CD40 bispecific | 2.4 | (ROR1) | 1.2 | 10.0 | 0.23 |
| | 8.2 | (CD40) | | | |

### Example 24 Dendritic Cell Cytokine Release by Bispecific Tumor Targeting Conjugate when the Conjugate is Bound to Tumor Antigen

[0692] This example shows that the immune stimulatory activity of a bispecific tumor targeting conjugate is retained when bound to a tumor antigen. Myeloid dendritic cells (mDCs) are derived from CD14⁺ monocytes isolated from human peripheral blood mononuclear cells (PBMCs) by negative selection using a commercially available kit. The monocytes are cultured in RPMI containing 10% fetal calf serum for seven days in complete medium supplemented with 25 ng/mL IL-4 and 10 ng/mL GM-CSF. The media is replaced with fresh media plus cytokines on day three. On day six, 5×10⁴ dendritic cells are added in the growth media to separate wells of a 96 well microtiter plate previously coated with varying concentrations of commercially available recombinant soluble HER2 ectodomain, a soluble CEA ectodomain, or a soluble MSLN ectodomain. The coating is performed by incubation of the added soluble tumor antigen at 1 ug/ml for 1 hour at room temperature, followed by 3 washes to remove any unbound protein. A CEA-CD40G1 antibody construct, CEA-DEC205G1 antibody construct, or CEA-CLEC9AG1 antibody construct is added to a well coated with CEA antigen comprising mDCs. A CEA-CD40G1-TLR8 agonist conjugate, CEA-DEC205G1-TLR8 agonist conjugate, or CEA-CLEC9AG1-TLR8 agonist conjugate is added to a well coated with CEA antigen comprising mDCs. A CEA-CD40G1-STING agonist conjugate, CEA-DEC205G1-STING agonist conjugate, or CEA-CLEC9AG1-STING agonist conjugate is added to a well coated with CEA antigen comprising mDCs. A MSLN-CD40G1 conjugate, MSLN-DEC205G1 conjugate, or MSLN-CLEC9AG1 conjugate is added to a well coated with MSLN antigen comprising mDCs. A MSLN-CD40G1-TLR8 agonist conjugate, MSLN-DEC205G1-TLR8 agonist conjugate, or MSLN-CLEC9AG1-TLR8 agonist conjugate is added to a well coated with MSLN antigen comprising mDCs. A MSLN-CD40G1-STING agonist conjugate, MSLN-DEC205G1-STING agonist conjugate, or MSLN-CLEC9AG1-STING agonist conjugate is added to a well coated with MSLN antigen comprising mDCs. A HER2-CD40G1 conjugate, HER2-DEC205G1 conjugate, or HER2-CLEC9AG1 conjugate is added to a well coated with HER2 antigen comprising mDCs. A HER2-CD40G1-TLR8 agonist conjugate, HER2-DEC205G1-TLR8 agonist conjugate, or HER2-CLEC9AG1-TLR8 agonist conjugate is added to a well coated with HER2 antigen comprising mDCs. A HER2-CD40G1-STING agonist conjugate, HER2-DEC205G1-STING agonist conjugate, or HER2-CLEC9AG1-STING agonist conjugate is added to a well coated with HER2 antigen comprising mDCs. Each antibody construct or conjugate is added to a different well at various concentrations. As controls, monospecific tumor antigen antibody is added to wells coated with tumor antigen or the bispecific tumor targeting conjugates described in this example are added to wells coated with an irrelevant tumor antigen. After 24 hour incubation in mDC growth media at 37° C. with a 5% CO₂ atmosphere supernatants are collected and the cytokines IL-6, TNFα, IL-12 and IL-10 that are produced by the mDC are quantitated by electrochemiluminesence signal by multiplex ELISA using commercially available reagents and plate reader from Meso Scale Discovery. When the bispecific tumor targeting conjugates are bound to tumor antigen, the cytokine is produced by mDCs in equal or greater amounts than the cytokine produced from mDCs in wells comprising the bispecific tumor targeting conjugates and an irrelevant tumor antigen or wells comprising monospecific tumor antigen antibody and tumor antigen.

### Example 25

### Cell Surface Immunomodulatory Molecule Expression is Increased by Bispecific Recombinant Antibody Conjugates when the Bispecific Recombinant Antibody Conjugate is Bound to Tumor Antigen

[0693] This example shows that human dendritic cell (DC) expression of CD54, CD80, CD86, MHC Class II (HLA-DR), and CD83 is increased when the bispecific recombinant antibody targeting conjugate is bound to tumor antigen, and that this increase is dose dependent. Human PBMCs are isolated. DCs are derived from human PBMCs by isolation of CD14⁺ monocytes followed by culture in RPMI containing 10% fetal calf serum for seven days in complete medium supplemented with 10 ng/mL IL-4 and 100 ng/mL GM-CSF. After three days of culture the media is removed and replaced with fresh media including cytokine supplement. On day six, the following bispecific recombinant antibody constructs or conjugates are added at varying concentrations: a CEA-CD40G1 antibody construct, CEA-DEC205G1 antibody construct, or CEA-CLEC9AG1 antibody construct is added to a well coated with CEA antigen comprising mDCs; a CEA-CD40G1-TLR8 agonist conjugate, CEA-DEC205G1-TLR8 agonist conjugate, or CEA-CLEC9AG1-TLR8 agonist conjugate is added to a well coated with CEA antigen comprising mDCs; a CEA-CD40G1-STING agonist conjugate, CEA-DEC205G1-STING agonist conjugate, or CEA-CLEC9AG1-STING agonist conjugate is added to a well coated with CEA antigen comprising mDCs; a MSLN-CD40G1 antibody construct, MSLN-DEC205G1 antibody construct, or MSLN-CLEC9AG1 antibody construct is added to a well coated with MSLN antigen comprising mDCs; a MSLN-CD40G1-TLR8 agonist conjugate, MSLN-DEC205G1-TLR8 agonist conjugate, or MSLN-CLEC9AG1-TLR8 agonist conjugate is added to a well coated with MSLN antigen comprising mDCs; a MSLN-CD40G1-STING agonist conjugate, MSLN-DEC205G1-STING agonist conjugate, or MSLN-CLEC9AG1-STING agonist conjugate is added to a well coated with MSLN antigen comprising mDCs; a HER2-CD40G1 antibody construct, HER2-DEC205G1 antibody construct, or HER2-CLEC9AG1 antibody construct is added to a well coated with HER2 antigen comprising mDCs; a HER2-CD40G1-TLR8 agonist conjugate, HER2-DEC205G1-TLR8 agonist conjugate, or HER2-CLEC9AG1-TLR8 agonist conjugate is added to a well coated with HER2 antigen comprising mDCs; or a HER2-CD40G1-STING agonist conjugate, HER2-DEC205G1-STING agonist conjugate, or HER2-CLEC9AG1-STING agonist conjugate is added to a well coated with HER2 antigen comprising mDCs. As controls, monospecific tumor antigen antibody is added to wells coated with tumor antigen or the bispecific recombinant antibody constructs described in this example are added to wells coated with an irrelevant tumor antigen. After 48 hours incubation in growth media, the cells are collected and washed by centrifugations and are then stained for 30 minutes on ice using manufacturer's recommended concentrations of commercially available anti-CD54, anti-CD80, anti-CD83, anti-CD86 and anti-MHC class II (anti-HLA-DR) monoclonal antibodies conjugated to laser sensitive fluors and are stained for viability. A separate aliquot for each treatment is stained with IgG matched isotype control antibody conjugate for anti-CD54, anti-CD80, anti-CD83, anti-CD86 and anti-MHC class II (anti-HLA-DR). After washing to remove unbound antibody-fluor molecules the stained cells are subjected to FACS analysis using a Celesta flow cytometer (BD Biosciences) with gating on live cells. The output was analyzed by FlowJo v10.2 software (FlowJo LLC) and curve fit with Prism 7.01 software (GraphPad Software, Inc.). When the bispecific tumor targeting conjugates are bound to tumor antigen, the DC expression of CD54, CD80, CD86, MHC Class II (HLA-DR), and CD83 is increased in equal or greater amounts than the DC expression of CD54, CD80, CD86, MHC Class II (HLA-DR), and CD83 in wells comprising the bispecific tumor targeting conjugates and an irrelevant tumor antigen or wells comprising monospecific tumor antigen antibody and tumor antigen.

### Example 26

### Pattern Recognition Receptors are Stimulated by Bispecific Recombinant Antibody when the Bispecific Recombinant Antibody Conjugate is Bound to Tumor Antigen

[0694] This example shows that pattern recognition receptors (PRRs) are stimulated by bispecific recombinant antibody conjugates when the bispecific recombinant antibody conjugates are bound to tumor antigen. The bispecific recombinant antibody conjugates with STING agonists attached are HER2-CD40G1-STING agonist conjugate, EGFRvIII-CD40G1-STING agonist conjugate, or CEA-CD40G1-STING agonist conjugate, which are tested for their ability to activate the PAMP signal using tumor cell lines bearing HER2, EGFRvIII, or CEA. Each conjugate without the CD40G1 antigen binding domain (i.e., HER2-STING agonist conjugate, EGFRvIII-STING agonist conjugate, and CEA-STING agonist conjugate) is used as a control. Titrations of the bispecific recombinant antibody conjugates with STING agonists or control conjugates are added to 10⁵ tumor cells in wells of a 96 well plate followed by 24 hour incubation (QPCR), 0-180 minutes (Western Blot) or 48 hour (FACS) incubations. Three assay formats were used to demonstrate tumor cell response to the PAMP/DAMP immune stimulators. In the first mRNA is isolated from the tumor cells after bispecific recombinant antibody conjugates conjugated with an immune-stimulatory compound and control treatment and QPCR is performed to quantitate type 1 and type 2 interferon mRNAs. In the second cell lysates are made, the proteins analyzed by Western blot analysis for relative levels of phosphor-TBK1 and phosphor-IRF3. In the third the relative levels of MHC Class I on the treated tumor cells is measured by FACS. For QPCR analysis mRNA is isolated, reverse transcribed and subjected QPCR analysis with fluor labeled primers and probes for type 1 and type 2 interferon using commercially available reagents (GoTaq Probe, Promega) and QPCR thermocycler (Roche LightCycler 480) and comparing to QPCR for “housekeeping gene” pair ACTB-GAPDH. For phospho-protein analysis proteins are extracted with triton cell lysis buffer containing proteinase (Thermo Fisher) and phosphatase (Sigma) inhibitors, 30 mg of protein is separated by SDS-PAGE, transferred to Immobilon FL membranes (Millipore) and the membrane is incubated with commercially available for phosphorylated TBK1, phosphorylated IRF3, STING, and GAPDH. After washing the bound antibodies are detected with anti-rabbit IRDye 680D and an Imaging system. FACS analysis is performed after dissociating the cells from the well using Accutase, incubating on ice for 30 minutes with fluor-conjugated mouse anti-human HLA-ABC (BD Biosciences). The results of the analysis show that the bispecific recombinant antibody conjugates retain the ability to activate immune stimulating activities in tumor cells specifically when bound to their tumor antigen.

### Example 27

### Immune Activation Capabilities of Immune Suppressive Cells are Increased when Bispecific Recombinant Antibody Constructs or Bispecific Recombinant Antibody Conjugates are Bound to their Specific Antigen

[0695] This example shows that the immune activation capabilities of immune suppressive cells are increased when bispecific recombinant antibody constructs are bound to their specific tumor antigen or when bispecific recombinant antibody conjugates are bound to their specific tumor antigen.

[0696] Activating immune-stimulatory cytokines and activating cell surface immune-stimulatory molecules important for T cell antigen responses from immunosuppressive Myeloid Derived Suppressive Cells (MDSC) are increased when bispecific recombinant antibody constructs are bound to their specific tumor antigen by their first antigen binding domain or when bispecific recombinant antibody conjugates conjugated with a TLR8 agonist or STING agonist are bound to their specific tumor antigen by their first antigen binding domain. Wells are coated with tumor antigen as described in EXAMPLE 24. Human peripheral blood mononuclear cells (PBMCs) are isolated as in EXAMPLE 38. MDSC are derived from PBMCs by isolation of CD14⁺ monocytes. The monocytes are cultured in T-25 flasks at 5×10⁵ cells/ml in complete medium (RPMI+10% FBS+P/S+L-Glut+Na-Pyr) for 7 d, supplemented with IL-6 (10 ng/ml; Peprotech) and GM-CSF (10 ng/ml; Peprotech). Medium and cytokines are refreshed every 2-3 d. On day 7 of culture, MDSC are lifted and disassociated using HyQTase (GE Life Sciences) and washed twice with complete media. To determine conditional immune stimulation, MDSCs are plated at 5×10⁴ cells/well into 96 well plates where the individual wells contained cells with surface expression of either HER2, CEA, or MSLN tumor antigens. The following bispecific recombinant antibody constructs are added at varying concentrations to the wells coated with the relevant tumor antigen: HER2-CD40G1, CEA-CD40G1, MSLN-CD40G1, HER2-DEC205G1, CEA-DEC205G1, MSLN-DEC205G1, HER2-CLEC9AG1, CEA-CLEC9AG1, or MSLN-CLEC9AG1. Additionally, each of these bispecific recombinant antibody conjugates conjugated with a TLR8 agonist or STING agonist are added to aliquots of MDSC and tumor antigen for testing. Anti-CD40 agonist antibody conjugated with a TLR8 agonist or STING agonist, anti-DEC-205 antibody conjugated with a TLR8 agonist or STING agonist, anti-CLEC9A antibody conjugated with a TLR8 agonist or STING agonist, or HER2 antibody conjugated with a TLR8 agonist or STING agonist are added to aliquots of MDSCs and tumor antigens as controls. As an additional control, bispecific recombinant antibody conjugates were added wells containing MDSCs and irrelevant tumor antigen. After 24 hours of co-culture supernatants are removed and assayed for the cytokines IL-12p70, IL-10 and TNFα as described in EXAMPLE 22. In addition, the MDSCs are removed from the wells by dissociation with HyQtase (GE Life Sciences) then subjected to FACS analysis as described in EXAMPLE 25 using commercially available reagents for CD33, CD11b, CD80, CD86, MHC Class II, and viable cells. The level of CD80, CD86, and MHC Class II is assessed for viable MDSC defined as viable dye negative CD33⁺ CD11b cells. As is shown by the results, IL-12p70 and TNFα production, and CD80, CD86, and MHC Class II density on MDSCs is increased when bispecific recombinant antibody constructs are bound to their specific tumor antigen. Similar results are shown when bispecific recombinant antibody conjugates attached to a TLR8 agonist or a STING agonist are bound to their specific tumor antigen.

### Example 28

### Immune Suppressive Activity of Immune Suppressive Cells is Decreased when Bispecific Recombinant Antibody Conjugates are Bound to their Specific Tumor Antigen

[0697] This example shows that the immune suppressive activity of immune suppressive cells is decreased when bispecific recombinant antibody constructs are bound to their specific tumor antigen or when bispecific recombinant antibody conjugates are bound to their specific tumor antigen.

[0698] Myeloid Derived Suppressive Cell (MDSC) suppression of T cell activation is reduced when bispecific recombinant antibody constructs are bound to their specific tumor antigen by their second binding or when bispecific recombinant antibody conjugates with a TLR8 agonist or a STING agonist are bound to their specific tumor antigen by their first binding domain. Human PBMCs are isolated as in EXAMPLE 38. MDSC are generated as in EXAMPLE 27. MDSCs are harvested from the flasks using HyQTase (GE Life Sciences) and washed twice with complete media. Dilutions of the MDSC suspended in growth media beginning at 5×10⁴ are added to tumor antigen coated wells of a round bottom 96 well plates followed by incubation at 37° C. 5% CO₂ for 24 hours. The tumor antigen coating is performed with 1 ug/ml of soluble tumor cell antigens as described in EXAMPLE 25. The following bispecific recombinant antibody conjugates are added to aliquots of the MDSC with relevant tumor antigen for testing: HER2-CD40G1, CEA-CD40G1, MSLN-CD40G1, HER2-DEC205G1, CEA-DEC205G1, MSLN-DEC205G1, HER2-CLEC9AG1, CEA-CLEC9AG1, and MSLN-CLEC9AG1. Additionally, each of these bispecific recombinant antibody conjugates with a TLR8 agonist or STING agonist are added to aliquots of MDSCs and relevant tumor antigen for testing. Anti-CD40 agonist antibody conjugated with a TLR8 agonist or STING agonist, anti-DEC-205 antibody conjugated with a TLR8 agonist or STING agonist, anti-CLEC9A antibody conjugated with a TLR8 agonist or STING agonist, or HER2 antibody conjugated with a TLR8 agonist or STING agonist are added to aliquots of MDSC and relevant tumor antigen as controls. After incubation of each well, a T cell suppression assay is performed as follows. Donor-matched T cells are isolated by negative selection (STEMCELL) and labeled with CellTrace Violet (ThermoFisher) according to the manufacturer's directions. 5×10⁴ labeled T cells are added to each MDSC-containing well to generate various MDSC to T cell ratios (i.e., 1:1, 1:2, 1:4, 1:16, 1:32). T cell-alone wells are included as a control for maximal proliferation. Cultures are stimulated by adding 5×10⁴ Dynabeads Human T-Activator CD3/CD28 (ThermoFisher) to each well. Cultures are then incubated at 37° C. for 4 days. On day 4, T cell proliferation is assessed by measuring proliferation dye dilution using FACS. As is shown by the results, a loss of suppressive function, as evidenced by increased numbers of T cells with lower MFIs for CellTrace Violet due to increased cell divisions, is found for T cells from wells incubated with bispecific recombinant antibody constructs and their tumor antigen. Similar results are shown incubation with bispecific recombinant antibody conjugates with a TLR8 agonist or STING agonist and their tumor antigen.

### Example 29

### Accumulation of Bispecific Tumor Targeting is Increased in Tumors in Comparison with Non-Tumor Targeting Anti-CD40 Conjugates

[0699] This example shows that the level of bispecific tumor targeting conjugates found in tumors is increased in comparison with the level of non-tumor targeting anti-CD40 conjugates found in tumors. Additionally, this example shows that the tumor/spleen ratio of bispecific tumor targeting conjugates is increased in comparison with the tumor/spleen ratio of non-tumor targeting anti-CD40 conjugates. Increased levels of the bispecific tumor targeting conjugate in tumors or in associated secondary lymphoid organs, where tumor antigens and tumor derived immunosuppression can be maximal, can help increase tumor innate and adaptive immune responses while limiting toxicities found with systemic immune activation.

[0700] Tumor accumulation of a HER2-CD40 conjugate with motolimod is compared to a control CEA-CD40 conjugate with motolimod and a control anti-CD40 conjugate with motolimod in an orthotopic HER2+ C57B16 syngeneic model using transgenic mice humanized for CD40. Transfectants of the b6 breast tumor cell line E0711 tumor line expressing human HER2 are generated by standard transfection protocols followed by drug selection and soft agar cloning. The human tumor antigen expressing line is implanted orthotopically in mammary fat pads in huCD40 tg mice at a dose of 1×10⁶ cells/mouse. The tumor volume is measured by calipers. Mice with tumors of approximately 200 mm² are intravenously injected with approximately 5-10 μCi of HER2-C40G1 conjugate with motolimod, CEA-CD40G1 conjugate with motolimod, or anti-CD40 antibody conjugate with motolimod, in which each are radiolabeled with 125I by Bolton Hunter technology to specific activity of approximately 1 uCi/μg. Mice are euthanized at 0 hours, at 24 hours or at 48 hours after injection. Blood, spleen and tumors are collected and the relative levels of the radiolabeled compositions or antibodies are quantitated by a gamma counter. A higher percentage of input tracer in the tumors and a greater tumor/spleen ratio is found in mice injected with HER2-C40G1 conjugate with motolimod as compared with the CEA-CD40G1 conjugate with motolimod or the anti-CD40 antibody conjugate with motolimod.

### Example 30

### The Anti-Tumor Response is Enhanced by Bispecific Tumor Targeting Conjugates

[0701] This example shows the anti-tumor immune response is enhanced by bispecific tumor targeting antibody constructs or by bispecific tumor targeting conjugates.

[0702] A human immune cell mediated anti-tumor response in tumor xenograft models using immunocompromised mice is enhanced by bispecific tumor targeting antibody constructs or by bispecific tumor targeting conjugates with a TLR8 agonist or STING agonist. In immunocompromised mice, 1×10⁷ cells/animal human tumor cells from lines bearing either HER2, CEA or EGFRvIII are co-injected subcutaneously into the flanks of mice from strain NSG (NOD.Cg-Prkdc^{scid}IL-2rg^{tm1Wj1}) along with donor matched human T cells (1×10⁶/animal) and mDCs (5×10⁵/animal). The incorporation of human mDCs in this model allows for the assessment of in vivo immune-mediated activity of bispecific tumor targeting antibody constructs or bispecific tumor targeting conjugates with a TLR8 agonist or STING agonist. Bispecific tumor targeting antibody constructs or by bispecific tumor targeting conjugates with a TLR8 agonist or STING agonist bearing one of the following first antigen specificities (HER2, CEA, EGFRvIII) and one of the following second antigen specificities (CD40, DEC205) is injected intraperitoneally immediately prior to tumor injection. As a control, bispecific tumor targeting antibody constructs or by bispecific tumor targeting conjugates with a TLR8 agonist or STING agonist in which the second antigen binding domain is not directed to antigen on the injected tumor is injected intraperitoneally immediately prior to tumor injection. Tumor growth is measured using calipers twice per week, beginning seven days post tumor cell transfer and ending at study termination, approximately 3 weeks after tumor cell inoculation. As is shown by the results, tumor growth is reduced only when the injected tumor cells express the first antigen specificity of the bispecific tumor targeting antibody constructs or of the bispecific tumor targeting conjugates with a TLR8 agonist or STING agonist.

### Example 31

### Treatment of HER2 Expressing Cancer by Administering a Bispecific Tumor Targeting Conjugate

[0703] This example describes treatment of a HER2 expressing cancer with a bispecific tumor targeting conjugate. A human patient is diagnosed with a cancer that expresses the tumor-associated antigen p185HER2, such as breast cancer or gastric cancer. A bispecific tumor targeting conjugate comprising a HER2-CD40 conjugate, which specifically binds the tumor-associated antigen p185HER2, conjugated with a TLR8 agonist or STING agonist is administered to the patient. An anti-tumor response is induced against tumor cells expressing p185HER2, such as a T cell-mediated immune response and an innate immune response, leading to control and eradication of tumor cells.

### Example 32

### Treatment of DLL3 Expressing Cancer by Administering a Bispecific Tumor Targeting Conjugate

[0704] This example describes treatment of a DLL3 expressing cancer with a bispecific tumor targeting conjugate. A human patient is diagnosed with a cancer that expresses the tumor-associated antigen DLL3, such as small cell lung cancer. A bispecific tumor targeting conjugate comprising DLL3-DEC-205 conjugate with a TLR8 agonist or STING agonist is administered to the patient. An anti-tumor response is induced against tumor cells expressing DLL3, such as a T cell-mediated immune response and an innate immune response, leading to control and eradication of tumor cells.

### Example 33

### Stability of Bispecific Tumor Targeting Conjugate Conjugated with an Immune-Stimulatory Compound Conjugate in IgG Depleted Human Serum

[0705] This example shows the stability of a bispecific tumor targeting antibody construct and bispecific tumor targeting conjugate in IgG depleted human serum. Stability of a bispecific tumor targeting antibody construct and bispecific tumor targeting conjugate in human serum (IgG depleted) is measured over 96 hours at 37° C. using either a direct HIC-UV analysis approach (Method A) or an affinity capture approach (Method B). Bispecific tumor targeting antibody constructs or bispecific tumor targeting conjugates are spiked in IgG-depleted human serum (BBI solutions # SF142-2) in sterile tubes (75% final serum concentration) and samples are split into 4 aliquots of equal size then transferred to a 37° C. incubator. One of the aliquots of each sample is taken from the incubator at each time-point (T=0h, 24h, 48h, 96h) and the stability of the bispecific tumor targeting antibody construct or the bispecific tumor targeting conjugate, or the average immune-stimulatory compound-bispecific tumor targeting conjugate ratios (DAR), is recorded.

### Method A: Direct HIC-UV Analysis

[0706] At 0, 24, 48, and 96 hours after the beginning of incubation, bispecific tumor targeting antibody construct or bispecific tumor targeting conjugate spiked in IgG depleted human serum is analyzed by analytical hydrophobic interaction chromatography (HIC) using a TOSOH TSKgel Butyl-NPR 4.6 mm×35 mm HIC column (TOSOH Bioscience, #14947) connected to a Dionex Ultimate 3000RS HPLC system (ThermoFisher Scientific, Hemel Hemstead, UK). The stability of the bispecific tumor targeting conjugate is assessed and is found to remain stable at each time point. The average DAR is found to remain stable at each timepoint.

### Method B: Affinity Capture, De-Glycosylation and RP-ESI-MS Analysis

[0707] A bispecific tumor targeting antibody construct or bispecific tumor targeting conjugate is immunocaptured from the IgG depleted human serum using an anti-Human IgG (Fc specific) biotin antibody immobilized on streptavidin beads at 0, 24, 48 and 96 hours after the beginning of incubation. After elution from the beads, the samples are de-glycosylated using agarose-immobilized EndoS (Genovis Inc, USA). The de-glycosylated bispecific tumor targeting antibody construct or bispecific tumor targeting conjugate is analyzed by reverse phase chromatography hyphenated to electrospray ionization mass spectrometry (RP-ESI-MS) using an Acquity nano UPLC in line with a Xevo G2S Q-TOF (Waters, Elstree, UK). The separation is performed using an Acquity UPLC online coupled to an ESI-MS mass spectrometer. Mass spectrometric analysis is performed in positive ion mode, scanning from 1000 to 4000 m/z in high mass operating mode. The ion envelope produced by each sample is deconvoluted using the MaxEnt1 algorithm provided within the MassLynx software (Waters, Elstree, UK). The stability of the bispecific tumor targeting conjugate is assessed and is found to remain stable at each time point. The average DAR is found to remain stable at each timepoint.

### Example 34

### Bispecific Recombinant Antibody Constructs Showed Reduction in Binding to the Cellularly Expressed Antigen Presenting Cell Target CD40 Compared to Parental Anti-CD40 Monoclonal Antibody

[0708] This example shows that a bispecific recombinant antibody construct had reduced binding to the antigen presenting cell (APC) target CD40 when binding was measured on whole cells expressing native protein compared to parental anti-CD40 monoclonal antibody.

[0709] Bispecific anti-HER2-anti-CD40 IgG1 antibody construct (HER2-CD40G1) (prepared as described in Example 18) binds to CD40 expressed on dendritic cells less efficiently than the parental anti-CD40 monoclonal antibody (SBT-040G1). Monocytes were isolated from total human peripheral blood mononuclear cells (PBMCs) by magnetic bead-based negative selection. To generate monocyte-derived dendritic cells (moDCs), monocytes were cultured for 7 days in the presence of GM-CSF and IL-4. moDCs were stained with equivalent molar concentrations of either SBT-040G1 antibody or HER2-CD40G1 antibody construct followed by incubation with a PE-labeled goat anti-human IgG polyclonal detection antibody. Assessment of antibody binding by flow cytometry indicated a binding EC50 for SBT-040G1 antibody of 2.8 nM compared to a binding EC50 of 23.2 nM for HER2-CD40G1 antibody construct, and FIG. 7A also shows that HER2-CD40G1 antibody construct binds to CD40 expressed on dendritic cells less efficiently than SBT-040G1. Therefore, HER2-CD40G1 antibody construct binding to surface CD40 on moDCs was decreased compared to SBT-040G1 antibody.

### Example 35

### Generation of a Bispecific Anti-HER2×Anti-CD40 Fcnull Recombinant Antibody

[0710] This example shows a method for generating a bispecific recombinant antibody with a human Fcγ receptor (FcγR) binding null Fc domain. The anti-CD40 single chain Fv (scFv) in the VH-VL orientation was fused to the C-terminus of the anti-HER2 heavy chain (VH—CH1-CH2-CH3) (pertuzumab) containing the Fc null mutations to generate the anti-HER2 VH—CH1-CH2-CH3-anti-CD40 scFv heavy chain. The human IgG₁ null Fc domain was comprised the following mutations: L234A, L235A, G237A, and K322A.

[0711] This heavy chain was co-expressed with the light chain of anti-HER2 (VL-Ck) (pertuzumab) in the transient EpiCHO system in 180 mL of CHO media. The EpiCHO cells were transfected with heavy and light bispecific constructs using ExpiFectamine CHO reagent (Thermo Fisher) in 180 mL of CHO cell culture at a cell density of 6 million cells/mL. The supernatant was harvested 7 days after the transfection and the bispecific antibody was purified over HiScreen MabSelect SuRe Protein A column on a GE AKTA Pure machine. Protein was dialyzed against PBS and analyzed on Size Exclusion Chromatography which showed the % purity to be around 85%. 32 mg of protein was recovered giving a yield of 178 ug/mL expression from the harvested supernatant.

### Example 36

### Target Binding Affinity of a HER2×Anti-CD40 Fcnull Recombinant Bispecific Antibody

[0712] This example shows that the anti-HER2×anti-CD40 Fcₙᵤₗₗ recombinant bispecific antibody bound to monomeric human HER2 and the monomeric extracellular domain of human CD40 (CD40 ECD) with similar affinity as its parent anti-HER2 and anti-CD40 antibodies.

[0713] The anti-HER2×anti-CD40 Fcₙᵤₗₗ antibody was prepared as described in Example 35. Analysis of human HER2 and CD40 ECD interactions were performed using Octet Red 96 instrument (ForteBio). The Octet systems use propriety BLI to analyze biomolecular interaction. Anti-HER2 parental monoclonal antibody, anti-CD40 parental monoclonal antibody, and recombinant bispecific antibodies were immobilized on anti-human Fc biosensors and incubated with varying concentration of monomeric human HER2 and human CD40 ECD ranging from 1.2 nM to 300 nM in PBS/0.1% BSA/0.02% Tween 20. The experiments were performed using 5 steps: (1) baseline acquisition (60 s); (2) parental antibodies and bispecific antibodies loading onto anti-human Fc biosensor (120 s); (3) second baseline acquisition (60 s); (4) association of interacting monomeric HER2 and CD40 ECD proteins for kₒₙ measurement (120 s); and (5) dissociation of interacting monomeric HER2 and CD40 ECD for k_{off} measurement (300 s). The interacting monomeric HER2 and CD40 ECDs were used at 6 concentrations of 3-fold concentration series. Data were analyzed using Octet Data Analysis Software 9.0 (ForteBio) and fitted to the 1:1 binding model. Equilibrium dissociation constants (K_{D}) were calculated by the ratio of kₒₙ to k_{off}. A summary of this data is shown in TABLE 26. The binding of the bispecific recombinant antibody, anti-HER2×anti-CD40 Fcₙᵤₗₗ, to HER2 and CD40 ECD were similar to the binding of the parental anti-HER2 monoclonal antibody and anti-CD40 monoclonal antibody.

### Example 37

### Fc Receptor Binding Affinity of Anti-HER2×Anti-CD40 Fcnull Recombinant Bispecific Antibody

[0714] This example shows that the recombinant bispecific antibody anti-HER2×anti-CD40 Fcₙᵤₗₗ (HER2-CD40 Fcₙᵤₗₗ) containing the null mutations was not bound to Fcγ receptors as compared to a recombinant bispecific antibody with an intact Fc comprising domain.

[0715] The anti-HER2×anti-CD40 Fcₙᵤₗₗ antibody was prepared as described in Example 35. The anti-HER2×CD40 IgG antibody was prepared as described in Example 18. Human FcγR interaction analysis was performed using an Octet Red 96 instrument. For human FcγRI and FcγRIIA interactions, the HER2-CD40 Fcₙᵤₗₗ recombinant antibody or the bispecific recombinant antibody with an intact Fc comprising domain was immobilized on anti-human Fc biosensors and incubated with varying concentration of monomeric FcγR ranging from 1.2 nM to 300 nM in PBS/0.1% BSA/0.02% Tween 20. The experiments were performed using five steps: (1) baseline acquisition (60 s); (2) bispecific antibody loading onto anti-human Fc biosensor (120 s); (3) second baseline acquisition (60 s); (4) association of interacting FcγR for kₒₙ measurement (120 s); and (5) dissociation of interacting FcγR for k_{off} measurement (300 s). The interacting monomeric FcγRs were used at 4-6 concentrations of a 3-fold concentration series. The data were analyzed using Octet Data Analysis Software 9.0 (ForteBio)™ and fit to the 1:1 binding model. Equilibrium dissociation constants (K_{D}) were calculated by the ratio of kₒₙ to k_{off}.

[0716] For human FcγRIIIA F158 and FcγRIIIA V158 interaction studies, the FcγRs were immobilized on anti-His tag biosensors and incubated with varying concentrations of the HER2-CD40 Fcₙᵤₗₗ recombinant antibody or the recombinant bispecific antibody with an intact Fc comprising domain ranging from 37 nM to 1 μM. The experiment was performed using five steps: (1) Baseline acquisition (30 s); (2) human FcγRs loading to the anti-His tag biosensor (90 s); (3) second baseline acquisition (30 s); (4) association of interacting recombinant bispecific antibodies for kₒₙ measurement (30 s); and (5) dissociation of interaction recombinant bispecific antibodies for k_{off} measurement (30 s). The interacting HER2-CD40 Fcₙᵤₗₗ recombinant antibody or recombinant bispecific antibody with an intact Fc comprising domain was used at 4 concentrations of a 3-fold concentration series. The data were analyzed using Octet Data Analysis Software 9.0 (ForteBio)™ and fit to the avidity binding model. Equilibrium dissociation constants (K_{D}) were calculated by the ratio of kon to koff. The data are shown in TABLE 26 along with data for the control monospecific antibodies tested using the same protocol as just described. The recombinant bispecific antibody, HER2-CD40 Fcₙᵤₗₗ did not bind to the Fcγ receptors unlike the bispecific antibody, HER2-CD40₁ Fc IgG1 where there was an intact unmutated Fc region.

### Example 38

### Lower Immunostimulatory Cytokine is Elicited by Unbound IgG1 Fcnull Recombinant Bispecific Antibodies Compared with Immunostimulatory Cytokine Elicited by Unbound IgG1 Fc Recombinant Bispecific Antibodies

[0717] This example shows that lower immunostimulatory cytokine is produced by human dendritic cells (mDCs) in the presence of unbound IgG1 Fcₙᵤₗₗ recombinant bispecific antibodies as compared with immunostimulatory cytokine produced by mDCs in the presence of unbound IgG1 Fc recombinant bispecific antibodies. This example also shows that lower immunostimulatory cytokine is produced by human dendritic cells (mDCs) in the presence of unbound IgG1 Fcₙᵤₗₗ recombinant bispecific antibodies conjugated with an immunostimulatory molecule as compared with immunostimulatory cytokine produced by mDCs in the presence of unbound IgG1 Fc recombinant bispecific antibodies conjugated with an immunostimulatory molecule.

[0718] Human peripheral blood mononuclear cells (PBMCs) are isolated from normal donors by a standard Ficoll-Hypaque protocol. Dendritic cells (mDCs) are derived from CD14⁺ monocytes isolated from PBMCs by negative selection using a commercially available kit. The monocytes are cultured in RPMI containing 10% fetal calf serum for seven days in complete medium supplemented with 25 ng/mL IL-4 and 10 ng/mL GM-CSF. The media is replaced with fresh media plus cytokines on day three. On day six the following bispecific recombinant antibodies are added to aliquots of the mDCs for testing: HER2-CD40 G1ₙᵤₗₗ, CEA-CD40 G1ₙᵤₗₗ, MSLN-CD40 G1ₙᵤₗₗ, HER2-DEC205 G1ₙᵤₗₗ, CEA-DEC205 G1ₙᵤₗₗ, MSLN-DEC205 G1ₙᵤₗₗ, HER2-CLEC9A G1ₙᵤₗₗ, CEA-CLEC9A G1ₙᵤₗₗ, MSLN-CLEC9A G1ₙᵤₗₗ, and their respective bispecific recombinant antibody with a G1 Fc domain instead of an G1ₙᵤₗₗ Fc domain. Additionally, each of these bispecific recombinant antibodies conjugated with a TLR8 agonist or STING agonist are added to aliquots of mDCs for testing. Anti-CD40 agonist antibody conjugated with a TLR8 agonist or STING agonist, anti-DEC-205 antibody conjugated with a TLR8 agonist or STING agonist, anti-CLEC9A antibody conjugated with a TLR8 agonist or STING agonist, or HER2 antibody conjugated with a TLR8 agonist or STING agonist are added to aliquots of mDCs as controls. After a 24 hour incubation, supernatants are collected and the cytokines IL-6, TNFα, IL-12p70, and IL-10 produced by the dendritic cells are quantitated by electrochemiluminesence signal by multiplex ELISA using commercially available reagents and plate reader from Meso Scale Discovery. Lower amounts of immunostimulatory cytokine is shown to be produced by human mDCs when bispecific IgG1 Fcₙᵤₗₗ recombinant antibodies are added as compared with immunostimulatory cytokine produced by human dendritic cells (mDCs) bispecific IgG1 Fc recombinant antibodies. Additionally, lower amounts of immunostimulatory cytokine is shown to be produced by human mDCs when bispecific IgG1 Fcₙᵤₗₗ recombinant antibodies conjugated to TLR8 agonists or STING agonists are added as compared with immunostimulatory cytokine produced by human dendritic cells (mDCs) bispecific IgG1 Fc recombinant antibodies conjugated to TLR8 agonists or STING agonists or monospecific antibodies conjugated to TLR8 agonists or STING agonists.

### Example 39

### Dendritic Cell Immunostimulatory Cytokine Release is Enhanced when Bispecific Recombinant Antibodies Containing G1null Fc Domains are Bound to their Specific Tumor Antigen

[0719] This example shows that immunostimulatory cytokine produced by human dendritic cells (mDCs) is enhanced when IgG1 Fcₙᵤₗₗ recombinant bispecific antibodies are bound to their specific tumor antigen or when IgG1 Fcₙᵤₗₗ recombinant bispecific antibodies conjugated with an immune stimulatory molecule are bound to their specific tumor antigen.

[0720] mDC cytokine production is enhanced when bispecific recombinant antibodies lacking FcγR binding (i.e., Fcₙᵤₗₗ) are bound to their specific tumor antigen by their first antigen binding domain or when recombinant bispecific antibodies lacking FcγR binding (i.e., Fcₙᵤₗₗ) conjugated with a TLR8 agonist or STING agonist are bound to their specific tumor antigen by their first antigen binding domain. Human PBMCs are isolated as in EXAMPLE 38. mDCs are derived from CD14⁺ monocytes isolated from the peripheral blood mononuclear cells (PBMCs) by negative selection using a commercially available kit. The monocytes are cultured in RPMI containing 10% fetal calf serum for seven days in complete medium supplemented with 25 ng/mL IL-4 and 10 ng/mL GM-CSF. The media is replaced with fresh media plus cytokines on day three. On day six, 5×10⁴ dendritic cells are added in the growth media to separate wells of a 96 well microtiter plate that is coated with varying concentrations of commercially available recombinant soluble HER2 ectodomain, a soluble CEA ectodomain or a soluble MSLN ectodomain. The coating is performed by incubation of the added soluble tumor antigen at 1 ug/ml for 1 hour at room temperature, followed by 3 washes to remove any unbound protein. The following bispecific recombinant antibodies containing G1ₙᵤₗₗ Fc domains added at varying concentrations to the wells coated with the relevant tumor antigen: HER2-CD40 G1ₙᵤₗₗ, CEA-CD40 G1ₙᵤₗₗ, MSLN-CD40 G1ₙᵤₗₗ, HER2-DEC205 G1ₙᵤₗₗ, CEA-DEC205 G1ₙᵤₗₗ, MSLN-DEC205 G1ₙᵤₗₗ, HER2-CLEC9A G1ₙᵤₗₗ, CEA-CLEC9A G1ₙᵤₗₗ, or MSLN-CLEC9A G1ₙᵤₗₗ, or any of these bispecific recombinant antibodies conjugated with a TLR8 agonist or STING agonist. The corresponding recombinant bispecific antibodies with G1 Fc domains or monospecific antibodies with G1 Fc domains, or these bispecific or monospecific antibodies conjugated with a TLR8 agonist or STING agonist are added at varying concentrations to wells coated with the relevant tumor antigen as controls. As an additional control, G1ₙᵤₗₗ Fc domain recombinant bispecific antibodies or G1ₙᵤₗₗ Fc domain recombinant bispecific antibodies conjugated with a TLR8 agonist or STING agonist are added to wells containing mDCs and irrelevant tumor antigen. After 24 hours incubation in mDC growth media at 37° C. with 5% CO₂ atmosphere supernatants are collected and the cytokines IL-6, TNFα, IL-12p70, and IL-10 produced by the mDCs are quantitated by electrochemiluminesence signal by multiplex ELISA using commercially available reagents and plate reader from Meso Scale Discovery. Immunostimulatory cytokine produced by mDCs is shown by the results to be enhanced when bispecific IgG1 Fcₙᵤₗₗ recombinant antibodies are bound to their specific tumor antigen. Similar results are shown when bispecific IgG1 Fcₙᵤₗₗ recombinant antibodies conjugated with a TLR8 agonist or STING agonist are bound to their specific tumor antigen.

### Example 40

### Cell Surface Immunomodulatory Molecule Expression is Increased when IgG1 Fcnull Recombinant Bispecific Antibodies are Bound to their Specific Tumor Antibodies

[0721] This example shows that the expression of cell surface immunomodulatory molecules on human myeloid dendritic cells (mDCs) is increased when bispecific IgG1 Fcₙᵤₗₗ recombinant antibodies are bound to their specific tumor antigen or when bispecific IgG1 Fcₙᵤₗₗ antibodies conjugated with an immune stimulatory molecule are bound to their specific tumor antigen.

[0722] mDC cell surface CD54, CD86, CD80, MHC Class II (HLA-DR) and CD83 expression are increased, in a dose dependent manner, when the first antigen binding domain of a bispecific IgG1 Fcₙᵤₗₗ recombinant antibody is bound to its specific tumor antigen or when the first antigen binding domain of a bispecific IgG1 Fcₙᵤₗₗ recombinant antibody conjugated with a TLR8 agonist or STING agonist is bound to its specific tumor antigen. Human peripheral blood mononuclear cells (PBMCs) are isolated as in EXAMPLE 38. mDCs are derived from PBMCs by isolation of CD14⁺ monocytes followed by culture in RPMI containing 10% fetal calf serum for seven days in complete medium supplemented with 10 ng/mL IL-4 and 100 ng/mL GM-CSF. After three days of culture the media is removed and replaced with fresh media including cytokine supplement. The following bispecific recombinant antibodies are added at varying concentrations to the wells coated with the relevant tumor antigen: HER2-CD40 G1ₙᵤₗₗ, CEA-CD40 G1ₙᵤₗₗ, MSLN-CD40 G1ₙᵤₗₗ, HER2-DEC205 G1ₙᵤₗₗ, CEA-DEC205 G1ₙᵤₗₗ, MSLN-DEC205 G1ₙᵤₗₗ, HER2-CLEC9A G1ₙᵤₗₗ, CEA-CLEC9A G1ₙᵤₗₗ, or MSLN-CLEC9A G1ₙᵤₗₗ, HER2-CD40 G1, CEA-CD40 G1, MSLN-CD40 G1, HER2-DEC205 G1, CEA-DEC205 G1, MSLN-DEC205 G1, HER2-CLEC9A G1, CEA-CLEC9A G1, or MSLN-CLEC9A G1. Additionally, each of these bispecific recombinant antibodies further comprising either an attached TLR8 agonist or STING agonist are added to aliquots of mDCs for testing. Anti-CD40 agonist antibody conjugated with a TLR8 agonist or STING agonist, anti-DEC-205 antibody conjugated with a TLR8 agonist or STING agonist, anti-CLEC9A antibody conjugated with a TLR8 agonist or STING agonist, or HER2 antibody conjugated with a TLR8 agonist or STING agonist are added to aliquots with varying concentrations of mDCs as controls. As an additional control, bispecific G1ₙᵤₗₗ Fc domain recombinant antibodies were added to wells containing mDCs and irrelevant tumor antigen. After 48 hours of incubation in growth media the cells are collected and washed by centrifugations then stained for 30 minutes on ice using manufacturer's recommended concentrations of commercially available anti-CD83, anti-CD86 and anti-MHC class II monoclonal antibodies conjugated to laser sensitive fluors as well as stained for viability. A separate aliquot for each treatment is stained with IgG matched isotype control antibody conjugate for anti-CD54, anti-CD80, anti-CD86, anti-CD83 and anti-MHC Class II (HLA-DR). After washing to remove unbound antibody-fluor molecules the stained cells are subjected to FACS analysis using a Celesta flow cytometer (BD Biosciences) with gating on live cells. The output is analyzed by FlowJo v10.2 software (FlowJo LLC) and curve fit with Prism 7.01 software (GraphPad Software, Inc.). As shown by the results, mDC cell surface CD54, CD80, CD86, MHC Class II (HLA-DR), and CD83 expression is increased, in a dose dependent manner, by the addition of bispecific IgG1 Fcₙᵤₗₗ recombinant antibody to wells containing its specific tumor antigen. Similar results are shown by the addition of bispecific IgG1 Fcₙᵤₗₗ recombinant antibody conjugated with a TLR8 agonist or STING agonist.

### Example 41

### Immune Activation Capabilities of Immune Suppressive Cells are Increased when Bispecific IgG1 Fcnull Recombinant Antibodies are Bound to their Specific Tumor Antigen

[0723] This example shows that the immune activation capabilities of immune suppressive cells are increased when bispecific IgG1 Fcₙᵤₗₗ recombinant antibodies are bound to their specific tumor antigen or when bispecific IgG1 Fcₙᵤₗₗ recombinant antibodies conjugated with an immune stimulatory molecule are bound to their specific tumor antigen.

[0724] Activating immunostimulatory cytokines and activating cell surface immunostimulatory molecules important for T cell antigen responses from immunosuppressive Myeloid Derived Suppressive Cells (MDSC) are increased when bispecific IgG1 Fcₙᵤₗₗ recombinant antibodies are bound to their specific tumor antigen by their first antigen binding domain or when bispecific IgG1 Fcₙᵤₗₗ recombinant antibodies conjugated with a TLR8 agonist or STING agonist are bound to their specific tumor antigen by their first antigen binding domain. Wells are coated with tumor antigen as described in EXAMPLE 25. Human peripheral blood mononuclear cells (PBMCs) are isolated as in EXAMPLE 38. MDSC are derived from PBMCs by isolation of CD14⁺ monocytes. The monocytes are cultured in T-25 flasks at 5×10⁵ cells/ml in complete medium (RPMI+10% FBS+P/S+L-Glut+Na-Pyr) for 7 d, supplemented with IL-6 (10 ng/ml; Peprotech) and GM-CSF (10 ng/ml; Peprotech). Medium and cytokines are refreshed every 2-3 d. On day 7 of culture, MDSC are lifted and disassociated using HyQTase (GE Life Sciences) and are washed twice with complete media. To determine conditional immune stimulation, MDSCs are plated at 5×10⁴ cells/well into 96 well plates where the individual wells contained cells with surface expression of either HER2, CEA, or MSLN tumor antigens. The following bispecific recombinant antibodies are added at varying concentrations to the wells coated with the relevant tumor antigen: HER2-CD40 G1ₙᵤₗₗ, CEA-CD40 G1ₙᵤₗₗ, MSLN-CD40 G1ₙᵤₗₗ, HER2-DEC205 G1ₙᵤₗₗ, CEA-DEC205 G1ₙᵤₗₗ, MSLN-DEC205 G1ₙᵤₗₗ, HER2-CLEC9A G1ₙᵤₗₗ, CEA-CLEC9A G1ₙᵤₗₗ, or MSLN-CLEC9A G1ₙᵤₗₗ, HER2-CD40 G1, CEA-CD40 G1, MSLN-CD40 G1, HER2-DEC205 G1, CEA-DEC205 G1, MSLN-DEC205 G1, HER2-CLEC9A G1, CEA-CLEC9A G, or MSLN-CLEC9A G1. Additionally, each of these bispecific recombinant antibodies conjugated with a TLR8 agonist or STING agonist are added to aliquots of MDSC and tumor antigen for testing. Anti-CD40 agonist antibody conjugated with a TLR8 agonist or STING agonist, anti-DEC-205 antibody conjugated with a TLR8 agonist or STING agonist, anti-CLEC9A antibody conjugated with a TLR8 agonist or STING agonist, or HER2 antibody conjugated with a TLR8 agonist or STING agonist are added to aliquots of MDSCs and tumor antigens as controls. As an additional control, bispecific G1ᵤ₁₁ Fc domain recombinant antibodies are added wells containing MDSCs and irrelevant tumor antigen. After 24 hours of co-culture supernatants are removed and are assayed for the cytokines IL-12p70, IL-10, and TNFα as described in Example 5. In addition, the MDSCs are removed from the wells by dissociation with HyQtase (GE Life Sciences) and then are subjected to FACS analysis as described in Example 6 using commercially available reagents for CD33, CD11b, CD80, CD86, MHC Class II, and viable cells. The level of CD80, CD86, and MHC Class II is assessed for viable MDSC defined as viable dye negative CD33+CD11b′ cells. As is shown by the results, IL-12p70 and TNFα production, and CD80, CD86, and MHC Class II density on MDSCs is increased when bispecific IgG1 Fcₙᵤₗₗ recombinant antibodies are bound to their specific tumor antigen. Similar results are shown when bispecific IgG1 Fcₙᵤₗₗ recombinant antibodies attached to a TLR8 agonist or a STING agonist are bound to their specific tumor antigen

### Example 42

### Immune Suppressive Activity of Immune Suppressive Cells is Decreased when Bispecific IgG1 Fcnull Recombinant Antibodies are Bound to their Specific Tumor Antigen

[0725] This example shows that the immune suppressive activity of immune suppressive cells is decreased when bispecific IgG1 Fcₙᵤₗₗ recombinant antibodies are bound to their specific tumor antigen or when bispecific IgG1 Fcₙᵤₗₗ recombinant antibodies conjugated with an immune stimulatory molecule are bound to their specific tumor antigen.

[0726] Myeloid Derived Suppressive Cell (MDSC) suppression of T cell activation is reduced when bispecific IgG1 Fcₙᵤₗₗ recombinant antibodies are bound to their specific tumor antigen by their first antigen binding domain or when bispecific IgG1 Fcₙᵤₗₗ recombinant antibodies conjugated with a TLR8 agonist or a STING agonist are bound to their specific tumor antigen by their first antigen binding domain. Human PBMCs are isolated as in EXAMPLE 38. MDSC are generated as in EXAMPLE 27. MDSCs are harvested from the flasks using HyQTase (GE Life Sciences) and are washed twice with complete media. Dilutions of the MDSC suspended in growth media beginning at 5×10⁴ are added to tumor antigen coated wells of a round bottom 96 well plates followed by incubation at 37° C. 5% CO₂ for 24 hours. The tumor antigen coatings is performed with 1 ug/ml of soluble tumor cell antigens as described in EXAMPLE 25. The following bispecific recombinant antibodies are added to aliquots of the MDSC with relevant tumor antigen for testing: HER2-CD40 G1ₙᵤₗₗ, CEA-CD40 G1ₙᵤₗₗ, MSLN-CD40 G1ₙᵤₗₗ, HER2-DEC205 G1ₙᵤₗₗ, CEA-DEC205 G1ₙᵤₗₗ, MSLN-DEC205 G1ₙᵤₗₗ, HER2-CLEC9A G1ₙᵤₗₗ, CEA-CLEC9A G1ₙᵤₗₗ, MSLN-CLEC9A G1ₙᵤₗₗ, and their respective bispecific recombinant antibody with a G1 Fc domain instead of an G1ₙᵤₗₗ Fc domain. Additionally, each of these bispecific recombinant antibodies conjugated with a TLR8 agonist or STING agonist are added to aliquots of MDSCs and relevant tumor antigen for testing. Anti-CD40 agonist antibody conjugated with a TLR8 agonist or STING agonist, anti-DEC-205 antibody conjugated with a TLR8 agonist or STING agonist, anti-CLEC9A antibody conjugated with a TLR8 agonist or STING agonist, or HER2 antibody conjugated with a TLR8 agonist or STING agonist are added to aliquots of MDSC and relevant tumor antigen as controls. After incubation of each well, a T cell suppression assay is performed as follows. Donor-matched T cells are isolated by negative selection (STEMCELL) and labeled with CellTrace Violet (ThermoFisher) according to the manufacturer's directions. 5×10⁴ labeled T cells are added to each MDSC-containing well to generate various MDSC to T cell ratios (i.e., 1:1, 1:2, 1:4, 1:16, 1:32). T cell-alone wells are included as a control for maximal proliferation. Cultures are stimulated by adding 5×10⁴ Dynabeads Human T-Activator CD3/CD28 (ThermoFisher) to each well. Cultures are then incubated at 37° C. for 4 days. On day 4, T cell proliferation is assessed by measuring proliferation dye dilution using FACS. As is shown by the results, a loss of suppressive function, as evidenced by increased numbers of T cells with lower MFIs for CellTrace Violet due to increased cell divisions, is found for T cells from wells incubated with bispecific IgG1 Fcₙᵤₗₗ recombinant antibodies and their tumor antigen. Similar results are shown incubation with bispecific IgG1 Fcₙᵤₗₗ recombinant antibodies conjugated to a TLR8 agonist or STING agonist and their tumor antigen.

### Example 43

### Systemic Immune Activation In Vivo is Reduced by Bispecific IgG1 Fcnull Recombinant Antibodies

[0727] This example shows that systemic immune activation in vivo is reduced by bispecific IgG1 Fcₙᵤₗₗ recombinant antibodies or by bispecific IgG1 Fcₙᵤₗₗ recombinant antibodies conjugated with an immune stimulatory molecule.

[0728] Systemic activation of immune cells can limit tolerated doses in patients to levels that compromise therapeutic benefit. However, systemic activation of immune cells after administration of bispecific IgG1 Fcₙᵤₗₗ recombinant antibodies is reduced as compared to activation after administration of bispecific IgG1 Fc recombinant antibodies. Additionally, systemic activation of immune cells after administration of bispecific IgG1 Fcₙᵤₗₗ recombinant antibodies conjugated with a TLR8 agonist or STING agonist is reduced as compared to activation after administration of bispecific IgG1 Fc recombinant antibodies. Transgenic mice humanized for CD40 by replacement of mouse CD40 by the human CD40 are injected intravenously with 0.2 mg/kg, 2.0 mg/kg and 20 mg/kg of HER2-CD40 G1ₙᵤₗₗ, CEA-CD40 G1ₙᵤₗₗ, MSLN-CD40 G1ₙᵤₗₗ, HER2-DEC205 G1ₙᵤₗₗ, CEA-DEC205 G1ₙᵤₗₗ, MSLN-DEC205 G1ₙᵤₗₗ, HER2-CLEC9A G1ₙᵤₗₗ, CEA-CLEC9A G1ₙᵤₗₗ, MSLN-CLEC9A G1ₙ₁₁, or their respective bispecific recombinant antibody with a G1 Fc domain instead of an G1ₙᵤₗₗ domain. Additionally, 0.2 mg/kg, 2.0 mg/kg and 20 mg/kg of each of these bispecific antibodies conjugated with a TLR8 agonist or STING agonist are intravenously injected into transgenic mice. Immune activation is monitored by observation of general health followed by euthanization at 24 hours and ascertaining immune activation of B and myeloid cell types from the spleen by FACS staining for CD86, CD80, MHC Class II, and intracellular levels of TNFα and IL-12p40. Cytokines IL-6, TNFα, IL-12p70, and IL-10 levels in serum are also quantitated by electrochemiluminesence signal by multiplex ELISA using commercially available reagents and plate reader from Meso Scale Discovery. As shown by the results, systemic immune activation is reduced after administration of bispecific IgG1 Fcₙᵤₗₗ recombinant antibodies. Similar results are shown after administration of bispecific IgG1 Fcₙᵤₗₗ recombinant antibodies conjugated with a TLR8 agonist or a STING agonist.

### Example 44

### The Anti-Tumor Immune Response is Enhanced by Bispecific IgG1 Fcnull Recombinant Antibodies

[0729] This example shows the anti-tumor immune response is enhanced by bispecific IgG1 Fcₙᵤₗₗ recombinant antibodies or by bispecific IgG1 Fcₙᵤₗₗ antibodies conjugated with an immune stimulatory molecule.

[0730] A human immune cell mediated anti-tumor response in tumor xenograft models using immunocompromised mice is enhanced by bispecific IgG1 Fcₙᵤₗₗ recombinant antibodies or by bispecific IgG1 Fcₙᵤₗₗ recombinant antibodies conjugated with a TLR8 agonist or STING agonist. In immunocompromised mice, 1×10⁷ cells/animal human tumor cells from lines bearing either HER2, CEA or EGFRvIII are co-injected subcutaneously into the flanks of mice from strain NSG (NOD.Cg-Prkdc^{scid}IL-2rg^{tm1Wj1}/SzJ) along with donor matched human T cells (1×10⁶/animal) and mDCs (5×10⁵/animal). The incorporation of human mDCs in this model allows for the assessment of in vivo immune-mediated activity of bispecific IgG1 Fcₙᵤₗₗ recombinant antibodies or bispecific IgG1 Fcₙᵤₗₗ u recombinant antibodies conjugated with a TLR8 agonist or STING agonist. Bispecific IgG1 Fcₙᵤₗₗ recombinant antibodies or by bispecific IgG1 Fcₙᵤₗₗ recombinant antibodies conjugated with a TLR8 agonist or STING agonist bearing one of the following target antigen specificities (HER2, CEA, EGFRvIII) and one of the following effector antigen specificities (CD40, DEC205) is injected intraperitoneally immediately prior to tumor injection. As a control, bispecific IgG1 Fcₙᵤₗₗ recombinant antibodies or by bispecific IgG1 Fcₙᵤₗₗ recombinant antibodies conjugated with a TLR8 agonist or STING agonist in which the target antigen binding domain is not directed to antigen on the injected tumor is injected intraperitoneally immediately prior to tumor injection. Tumor growth is measured using calipers twice per week, beginning seven days post tumor cell transfer and ending at study termination, approximately 3 weeks after tumor cell inoculation. As is shown by the results, tumor growth is reduced only when the injected tumor cells express the target antigen specificity of the bispecific IgG1 Fcₙᵤₗₗ recombinant antibodies or of the bispecific IgG1 Fcₙᵤₗₗ recombinant antibodies conjugated with a TLR8 agonist or STING agonist.

### Example 45

### Treatment of p185HER2 Expressing Cancer by Administering a Recombinant Antibody

[0731] This example describes treatment of p185HER2 expressing cancer with a recombinant antibody. A human patient is diagnosed with a cancer that expresses the tumor-associated antigen p185HER2, such as breast cancer or gastric cancer. The recombinant antibody is comprised of a target antigen binding domain, wherein the target antigen binding domain specifically binds the tumor-associated antigen p185HER2, and an effector antigen binding domain, wherein the effector antigen binding domain specifically binds CD40 molecules present on an antigen presenting cell, and an Fc comprising domain with one or more amino acid substitutions that reduce the affinity of the Fc domain to an Fc receptor compared to the affinity of the Fc domain to an Fc receptor in the absence of the one or more amino acid substitutions. The Fc comprising domain is attached to the p185HER2 antigen binding domain, and the Fc comprising domain is attached to the CD40 antigen binding domain. Conditional agonism of the CD40 molecules present on the antigen presenting cells that are present in proximity to the p185HER2 expressing tumor cells is induced by the recombinant antibody, thereby activating the antigen presenting cells and promoting an anti-tumor immune response.

### Example 46

### Treatment of CEA Expressing Cancer by Administering a Recombinant Antibody

[0732] This example describes treatment of carcinoembryonic antigen (CEA) expressing cancer with a recombinant antibody. A human patient is diagnosed with a cancer that expresses the tumor-associated antigen CEA, such as colorectal cancer. The recombinant antibody is comprised of a target antigen binding domain, wherein the target antigen binding domain specifically binds the tumor-associated antigen CEA, and an effector antigen binding domain, wherein the effector antigen binding domain specifically binds CD40 molecules present on an antigen presenting cell, and an Fc comprising domain with one or more amino acid substitutions that reduce the affinity of the Fc comprising domain to an Fc receptor compared to the affinity of the Fc domain to an Fc receptor in the absence of the one or more amino acid substitutions. The Fc comprising domain is attached to the CEA antigen binding domain, and the Fc comprising domain is attached to the CD40 antigen binding domain. An anti-tumor immune response and allowance of tolerable systemic use of a CD40 agonist at doses that are higher than can be achieved with CD40 agonist molecules alone are induced by the conditional agonism of the CD40 molecules present on the antigen presenting cells that are located in proximity to the CEA expressing tumor cells.

### Example 47

### Treatment of DLL3 Expressing Cancer by Administering a Recombinant Antibody

[0733] This example describes treatment of DLL3 expressing cancer with a recombinant antibody. A human patient is diagnosed with a cancer that expresses the tumor-associated antigen DLL3, such as small cell lung cancer. The recombinant antibody is comprised of a target antigen binding domain, wherein the target antigen binding domain specifically binds the tumor-associated antigen DLL3, and an effector antigen binding domain, wherein the effector antigen binding domain specifically binds CD40 molecules present on an antigen presenting cell, and an Fc comprising domain with one or more amino acid substitutions that reduce the affinity of the Fc comprising domain to an Fc receptor compared to the affinity of the Fc comprising domain to an Fc receptor in the absence of the one or more amino acid substitutions. The Fc comprising domain is attached to the DLL3 antigen binding domain, and the Fc comprising domain is attached to the CD40 antigen binding domain. An anti-tumor immune response and allowance of tolerable systemic use of a CD40 agonist at doses that are higher than can be achieved with CD40 agonist molecules alone are induced by the conditional agonism of the CD40 molecules present on the antigen presenting cells that are located in proximity to the DLL3 expressing tumor cells.

### Example 48

### Stability of Recombinant Antibody and Recombinant Antibody Conjugated with an Immunostimulatory Molecule in IgG Depleted Human Serum

[0734] This example shows the stability of recombinant antibody and recombinant antibody conjugated with an immune stimulatory molecule in IgG depleted human serum. Stability of recombinant antibody and recombinant antibody conjugated with an immune stimulatory molecule in human serum (IgG depleted) is measured over 96 hours at 37° C. using either a direct HIC-UV analysis approach (Method A) or an affinity capture approach (Method B). Recombinant antibody or recombinant antibody conjugated with an immune stimulatory molecule are spiked in IgG-depleted human serum (BBI solutions # SF142-2) in sterile tubes (75% final serum concentration) and samples are split into 4 aliquots of equal size then transferred to a 37° C. incubator. One of the aliquots of each sample is taken from the incubator at each time-point (T=0h, 24h, 48h, 96h) and the stability of the recombinant antibody or the average immune stimulatory molecule-recombinant antibody ratios (DAR) is recorded.

### Method A: Direct HIC-UV Analysis

[0735] At 0, 24, 48 and 96 hours after the beginning of incubation, the recombinant antibody or recombinant antibody conjugated with an immune stimulatory molecule spiked in IgG depleted human serum is analyzed by analytical hydrophobic interaction chromatography (HIC) using a TOSOH TSKgel Butyl-NPR 4.6 mm×35 mm HIC column (TOSOH Bioscience, #14947) connected to a Dionex Ultimate 3000RS HPLC system (ThermoFisher Scientific, Hemel Hemstead, UK). The stability of the recombinant antibody or conjugate is assessed and is found to remain stable at each time point. The average DAR is found to remain stable at each time point. at each time point.

### Method B: Affinity Capture, De-Glycosylation and RP-ESI-MS Analysis

[0736] Recombinant antibody or recombinant antibody conjugated with an immune stimulatory molecule is immunocaptured from the IgG depleted human serum using an anti-Human IgG (Fc specific) biotin antibody immobilized on streptavidin beads at 0, 24, 48 and 96 hours after the beginning of incubation. After elution from the beads, the samples are de-glycosylated using agarose-immobilized EndoS (Genovis Inc, USA). The de-glycosylated recombinant antibody conjugated with an immune stimulatory molecule is analyzed by reverse phase chromatography hyphenated to electrospray ionization mass spectrometry (RP-ESI-MS) using an Acquity nano UPLC in line with a Xevo G2S Q-TOF (Waters, Elstree, UK). The separation is performed using an Acquity UPLC online coupled to an ESI-MS mass spectrometer. Mass spectrometric analysis is performed in positive ion mode, scanning from 1000 to 4000 m/z in high mass operating mode. The ion envelope produced by each sample is deconvoluted using the MaxEnt1 algorithm provided within the MassLynx software (Waters, Elstree, UK). The stability of the recombinant antibody is assessed and is found to remain stable at each time point. The average DAR is found to remain stable at each time point.

### Example 49

### Bispecific IgG1 Fcnull Recombinant Antibody Showed Reduction in Binding to the Cellularly Expressed Antigen Presenting Cell Target CD40 Compared to Parental Anti-CD40 Monoclonal Antibody

[0737] This example shows that a bispecific IgG1 Fcₙᵤₗₗ recombinant antibody had reduced binding to the antigen presenting cell (APC) target CD40 when binding was measured on whole cells expressing native protein compared to parental anti-CD40 monoclonal antibody.

[0738] Anti-HER2-anti-CD40 Fcₙᵤₗₗ antibody was prepared as described in Example 35. Anti-HER2-anti-CD40 IgG1 Fcₙᵤₗₗ recombinant antibody (HER2-CD40 G1ₙᵤₗₗ) bound to CD40 expressed on dendritic cells less efficiently than the parental anti-CD40 monoclonal antibody (SBT-040 G1). Monocytes were isolated from total human peripheral blood mononuclear cells (PBMCs) by magnetic bead-based negative selection. To generate monocyte-derived dendritic cells (moDCs), monocytes were cultured for 7 days in the presence of GM-CSF and IL-4. moDCs were stained with equivalent molar concentrations of either SBT-040 G1 antibody or HER2-CD40 G1ₙᵤₗₗ recombinant antibody followed by incubation with a PE-labeled goat anti-human IgG polyclonal detection antibody. As shown in FIG. 7B, assessment of antibody binding by flow cytometry indicated a binding EC₅₀ for SBT-040 G1 antibody of 2.3 nM compared to a binding EC₅₀ of 33.9 nM for HER2-CD40 G1ₙᵤₗₗ recombinant antibody, and FIG. 7B also shows that HER2-CD40 G1ₙᵤₗₗ recombinant antibody bound to CD40 expressed on dendritic cells less efficiently than the parental anti-CD40 monoclonal antibody, SBT-040G1. Therefore, HER2-CD40 G1ₙᵤₗₗ recombinant antibody binding to surface CD40 on moDCs was decreased compared to SBT-040 G1 antibody.

### Example 50

### Dendritic Cells were Conditionally Activated by Bispecific IgG1 Fcnull Recombinant Antibody when Bound to Tumor Antigen as Measured by Activation Surface Marker

[0739] This example shows that expression of the activation surface markers CD54, CD86, CD83, CD80 and MHC II (HLA-DR) were increased on human dendritic cells (DCs) by a bispecific IgG1 Fcₙᵤₗₗ recombinant antibody when bound to tumor antigen.

[0740] The anti-HER2-anti-CD40 Fcₙᵤₗₗ antibody was prepared as described in Example 35. Anti-HER2-antiCD40 G1 antibody was prepared as described in Example 18. DCs were derived from human peripheral blood mononuclear cells (PBMCs) by isolation of CD14⁺ monocytes followed by culture in RPMI containing 10% fetal calf serum for seven days in complete medium supplemented with 10 ng/mL IL-4 and 100 ng/mL GM-CSF. CHO cells were engineered to overexpress human HER2 using standard transient transfection methods and transiently transfected cells were used in assays 2-3 days after transfection. Dendritic cells were plated with either HER2-expressing CHO cells or parental CHO cells with no HER2 expression at a 2:1 ratio in the presence of titrating concentrations of anti-HER2-anti-CD40 IgG1 Fcₙᵤₗₗ recombinant antibody (HER2-CD40 G1ₙᵤₗₗ) or the parental anti-CD40 monoclonal antibody (SBT-040 G1). After 24 hours, the cells were collected, washed and stained on ice with a collection of commercially available antibodies conjugated to fluorophores directed against CD54, CD86, CD83, CD80 and HLA-DR as per the manufacturer's recommended protocol. After washing to remove unbound antibody-fluor molecules, the stained cells were subjected to FACS analysis using a Celesta flow cytometer (BD Biosciences) with gating on live cells. The output was analyzed by FlowJo v10.2 software (FlowJo LLC). The addition of HER2-CD40 G1ₙᵤₗₗ recombinant antibody to co-cultures containing CHO-HER2 cells resulted in increased DC expression of all activation surface markers. In contrast, activation surface marker expression was not increased above baseline after addition of HER2-CD40 G1ₙᵤₗₗ recombinant antibody to co-cultures containing the CHO parental line without HER2 expression. For the control SBT-040 G1 antibody, co-cultures containing CHO-HER2 cells or CHO parental line without HER2 expression showed similar increased DC expression of activation surface markers, indicating activation surface marker expression induced by SBT-040 G1 was not dependent on cross-linking to tumor antigen. FIGS. 8A & 8B show representative data for CD86 and CD83, respectively. Therefore, DCs were conditionally activated by bispecific IgG1 Fcₙᵤₗₗ recombinant antibodies in the presence of tumor antigen.

### Example 51

### Antibody-Dependent Cellular Cytoxicity was Effectively Mediated by Bispecific Recombinant Antibody Constructs

[0741] This example shows that the activation of cell surface Fcγ receptors (FcγRs) is lowered when recombinant antibody is bound to dendritic cells in the absence of tumor antigen. The recombinant antibody is comprised of a first antigen binding domain, wherein the first antigen binding domain specifically binds to the tumor-associated antigen, and a second antigen binding domain, wherein the second antigen binding domain specifically binds to CD40 molecules present on an antigen presenting cell, and an Fc domain with one or more amino acid substitutions that reduce the affinity of the Fc domain to an Fc receptor compared to the affinity of the Fc domain to an Fc receptor in the absence of the one or more amino acid substitutions.

[0742] A reporter gene system is used to demonstrate lowered FcγR activation by the recombinant antibody compared to CD40 monoclonal antibody. Stable reporter cell lines for individual FcγRs are produced using the human leukemic T cell line Jurkat. This is done by using cDNAs encoding the FcγRs (and encoding the Fcγ chain for FcγRI and FcγRIIIa), cloning them into pVITRO1-neo-mcs vector (InvivoGen) and then introducing them into cells by electroporation followed by G418 drug selection. Stable individual FcγR expressing lines are created by limit dilution for clones and screening by FACS for cell surface FcγR using commercially available fluor-conjugated anti-FcγR antibodies. Vector pGL4.30[luc2P/NFAT-RE/Hygro] vector (Promega) encoding the reporter for FcγR activation is then introduced into the lines by transfection followed by hygromycin selection to yield stable FcγR+NFAT:LUC reporter cell lines. Next, 2×10⁴ of either myeloid derived dendritic cells generated from human normal peripheral blood mononuclear cells (PBMCs) bearing cell surface CD40 or cells from the human B lymphoblast cell line Daudi bearing cell surface CD40, are added to wells of a 96-well tissue culture dish along with 1×10⁵ Jurkat-FcγR-NFAT:LUC cells with comprising serial dilutions of the recombinant antibody or a monoclonal CD40 antibody. No tumor-associated antigen that binds to the first antigen binding domain is present in the wells. After 5 hours of incubation at 37° C./5% CO₂, FcγR activation is assessed by measuring luciferase activity using the ONE-Glo Luciferase Assay System (Promega) and the EnSpire Multimode Plate Reader (PerkinElmer). Diminished luciferase activity is found over the dose titration with the recombinant antibody, which demonstrates lower FcγR activation of the recombinant antibody.

### Example 52

### Binding of Cell Surface Fcγ Receptors is Lowered when Recombinant Antibody is Bound to Dendritic Cells in the Absence of Tumor Antigen

[0743] This example shows that the binding of cell surface Fcγ receptors (FcγRs) is lowered when recombinant antibody is bound to dendritic cells in the absence of tumor antigen. The recombinant antibody is comprised of a target antigen binding domain, wherein the target antigen binding domain specifically binds to the tumor-associated antigen, and an effector antigen binding domain, wherein the effector antigen binding domain specifically binds to CD40 molecules present on an antigen presenting cell, and an Fc comprising domain with one or more amino acid substitutions that reduce the affinity of the Fc comprising domain to an Fc receptor compared to the affinity of the Fc comprising domain to an Fc receptor in the absence of the one or more amino acid substitutions.

[0744] A flow cytometry-based antibody-mediated cell bridging assay is used to assess FcγR binding. Stable Jurkat cell lines expressing individual FcγRs are produced using cDNAs encoding the FcγRs (and encoding the Fcγ chain for FcγRI and FcγRIIIa) cloned into pVITRO1-neo-mcs vector (InvivoGen) that are introduced into cells by electroporation followed by G418 drug selection. Stable individual FcγR expressing lines are created by limiting dilution of clones and screening by fluorescence activated cell sorting (FACS) for cell surface FcγR using commercially available fluor-conjugated anti-FcγR antibodies. Next, either myeloid derived dendritic cells generated from human normal donor peripheral blood mononuclear cells (PBMCs) bearing cell surface CD40 or the human B lymphoblast cell line Daudi bearing cell surface CD40 are labelled with calcein AM (Ebioscience). The Jurkat FcγR clones are labelled with calcein violet 450 AM (Ebioscience). Then, 3×10⁴ CD40⁺ cells, 3×10⁵ Jurkat FcγR cells, and serial dilutions of either the recombinant antibody or a monoclonal CD40 antibody are added to wells of a 96 well tissue culture plate, incubated at 37° C./5% CO₂ for 30 minutes, followed by FACS analysis using a BD Celesta flow cytometer with FACS Diva software. No tumor-associated antigen that binds to the first antigen binding domain is present in the wells. Blocking the bridging by including commercially available anti-FcγR antibodies during the 30 minute assay incubation is used a control for FcγR dependency on bridging. The number of events that are recorded as double calcein/calcein violet as compared to control as analyzed with FlowJo software are evidence of the extent of antibody mediated cell bridging. The extent of cell bridging is diminished for the recombinant antibody as compared to the monoclonal CD40 antibody, demonstrating that the capacity to bind to FcγRs when bound to antigen presenting cell is lowered with recombinant antibody in the absence of the tumor-associated antigen of the first antigen binding domain.

### Example 53

### Dendritic Cells were Conditionally Activated by Bispecific Recombinant Antibody Constructs when Bound to Tumor Antigen as Measured by Activation Surface Markers

[0745] This example shows that expression of the activation surface markers CD54, CD86, CD83, CD80, and MHC II (HLA-DR) are increased on human dendritic cells (DCs) by a bispecific tumor targeting antibody construct bound to tumor antigen. This example also illustrates that this increased expression of activation surface markers on DCs was dependent upon the agonism of CD40 and agonism of Fc receptors.

[0746] The anti-HER2-anti-CD40 Fcₙᵤₗₗ antibody was prepared as described in Example 35. Anti-HER2-antiCD40 G1 antibody was prepared as described in Example 18. DCs were derived from human peripheral blood mononuclear cells (PBMCs) by isolation of CD14+ monocytes followed by culture in RPMI containing 10% fetal calf serum for seven days in complete medium supplemented with 10 ng/mL IL-4 and 100 ng/mL GM-CSF. CHO cells were engineered to overexpress human HER2 using standard transient transfection methods and transiently transfected cells were used in assays 2-3 days after transfection. DCs were plated with either HER2-expressing CHO cells or parental CHO cells with no HER2 expression at a 2:1 ratio in the presence of titrating concentrations of bispecific anti-HER2-anti-CD40 IgG1 (HER2-CD40G1) antibody construct, bispecific anti-HER2-anti-CD40 IgG1 Fc null antibody construct (HER2-CD40G1ₙᵤₗₗ), or the parental anti-CD40 monoclonal antibody (SBT-040G1). After 24 hours, the cells were collected, washed and stained on ice with a collection of commercially available antibodies conjugated to fluorophores directed against CD54, CD86, CD83, CD80, and HLA-DR as per the manufacturer's recommended protocol. After washing to remove unbound antibody-fluor molecules, the stained cells were subjected to FACS analysis using a Celesta flow cytometer (BD Biosciences) with gating on live cells. The output was analyzed by FlowJo v10.2 software (FlowJo LLC). The addition of HER2-CD40G1 antibody construct to co-cultures containing HER2⁺ CHO cells resulted in increased DC expression of all activation surface markers. In contrast, activation surface marker expression was not increased above baseline after addition of HER2-CD40G1 antibody to co-cultures containing the CHO parental line without HER2 expression (HER2-CHO cells). For the control SBT-040G1 antibody, co-cultures containing HER2⁺ CHO cells or HER2-CHO cells showed similar increased DC expression of activation surface markers, indicating activation surface marker expression induced by SBT-040G1 was not dependent on cross-linking to tumor antigen. Additionally, the HER2-CD40G1ₙᵤₗₗ antibody construct increased activation marker expression significantly over baseline, but the increased expression was reduced compared to the HER2-CD40G1 antibody construct. FIGS. 8A & 8B show representative data for CD86 and CD83, respectively. These data demonstrate that CD40 agonism and Fc receptor agonism both contributed to the increase in activation surface marker expression on DCs observed with a bispecific recombinant antibody constructs in the presence of tumor antigen. Therefore, DCs were conditionally activated by bispecific recombinant antibody construct in the presence of tumor antigen.

### Example 54

### Antibody-Dependent Cellular Cytoxicity was Effectively Mediated by Bispecific Recombinant Antibody Constructs

[0747] This example shows that antibody-dependent cellular cytotoxicity (ADCC) was effectively mediated by bispecific recombinant antibody constructs.

[0748] The anti-HER2-anti-CD40 Fcₙᵤₗₗ antibody was prepared as described in Example 35. Anti-HER2-antiCD40 G1 antibody was prepared as described in Example 18. The ability of the bispecific anti-HER2-anti-CD40 IgG1 (HER2-CD40G1) recombinant antibody construct to mediate ADCC as effectively as the anti-HER2 parental monoclonal antibody (SBT-050G1) was shown using a macrophage based in vitro assay. Monocytes were isolated from human peripheral blood mononuclear cells (PBMCs) using magnetic bead-based negative selection and cultured 7 days in the presence of GM-CSF to generate macrophages. A CHO cell line was engineered to overexpress human HER2 using standard transient transfection methods and used in assays 2 days after transfection. Macrophage cells were plated with HER2-expressing CHO cells at a 2:1 ratio in the presence of titrating concentrations of HER2-CD40G1 recombinant antibody constructs, anti-HER2-anti-CD40 IgG1 Fc null recombinant antibody constructs (HER2-CD40G1ₙᵤₗₗ), the parental anti-CD40 monoclonal antibodies (SBT-040G1) or SBT-050G1 antibodies. After 24 hours, CHO frequency was assessed by flow cytometry as a readout of ADCC activity. A reduction in CHO frequency was indicated by engulfment of the macrophages. Referring to FIG. 9, the HER2-CD40G1 recombinant antibody construct mediated equivalent ADCC activity to SBT-050G1 antibody. SBT-040G1 was unable to bind to the CHO target cells and did not facilitate ADCC. Treatment with the HER-CD40G1ₙᵤₗₗ recombinant antibody construct, which was engineered to no longer bind to Fc receptors, resulted in decreased ADCC relative to HER2-CD40G1 recombinant antibody construct. Therefore, the IgG1 Fc domain in the recombinant antibody construct was required to mediate the ADCC function.

### Example 55

### TNFα Production by PBMCs was Induced by Immune-Stimulatory Conjugates

[0749] This example shows that immune-stimulatory conjugates can increase production of a pro-inflammatory cytokine, TNFα, by PBMCs in the presence of tumor cells expressing a target tumor antigen.

[0750] Anti-HER2-antiCD40 G1 antibody was prepared as described in Example 18. Pertuzumab was used as the HER2 G1WT antibody. Conjugates were prepared as generally described in Example 15. PBMCs were isolated from human blood as described above. Briefly, PBMCs were isolated by Ficoll gradient centrifugation, resuspended in RPMI, and plated in 96-well flat bottom microtiter plates (125,000/well). Antigen-expressing tumor cells were then added (25,000/well) along with titrating concentrations of conjugates or unconjugated parental antibodies as controls. After overnight culture, supernatants were harvested, and TNFα levels were determined by AlphaLISA.

[0751] Referring to FIG. 20, SKBR3 tumor cells were added to PBMCs, prepared as described above. SKBR3 tumor cells express the tumor antigen HER2. Anti-HER2 TLR8 benzazepine agonist conjugates, either monospecific or bispecific with CD40, and conjugated to various TLR8 benzazepine agonists were added. The immune-stimulatory compound-linkers in the conjugates used in the study are identified in TABLES 30 and 31.

TABLE 30
Exemplary Compound-Linkers
Structure

[chemical structure]

[chemical structure]

[chemical structure]

[chemical structure]

[chemical structure]

[chemical structure]

[chemical structure]

[chemical structure]

[chemical structure]

TABLE 31
Exemplary Conjugates and Compound-Linkers Thereof

| Conjugate | Compound-Linker |
|---|---|
| Conjugate 1, Conjugate DD, | Compound-Linker 3.1 |
| Conjugate FF, Conjugate C | |
| Conjugate 2, Conjugate CC, | Compound-Linker 3.2 |
| Conjugate EE, Conjugate B | |
| Conjugate 3, Conjugate F | Compound-Linker 3.3 |
| Conjugate 6, conjugate, conjugate H | Compound-Linker 3.4 |
| conjugate I, TLR 8 Agonist | |
| Conjugate AA, Conjugate BB, | Compound-Linker 3.5 |
| Conjugate A | |
| Conjugate GG, Conjugate BB | Compound-Linker 3.6 |
| Conjugate D | Compound-Linker 3.7 |
| Conjugate E | Compound-Linker 3.8 |
| Conjugate G | Compound-Linker 3.9 |

[0752] TNFα production was measured after 24 hours. All of the conjugates were active, stimulating production of TNFα in a dose-dependent manner. In contrast, unconjugated HER2 antibody (HER2 G1WT) and bispecific HER2×CD40 antibody (HER2×CD40) did not stimulate TNFα production. (Both controls are adjacent the X-axis.)

[0753] Referring to FIG. 21, a similar study was performed using anti-TROP2 conjugates. TROP2 antibodies conjugated to TLR8 benzazepine agonists stimulated the production of TNFα in the presence of PBMCs, while the unconjugated control antibody did not.

### Example 56

### TNFα Production by Monocytes was Induced by Immune Stimulatory Conjugates

[0754] This example shows that monospecific and bispecific immune-stimulatory conjugates can increase the production of a pro-inflammatory cytokine, TNFα, by monocytes in the presence of tumor cells a targeted tumor antigen.

[0755] Monocytes were prepared as follows: PBMCs were isolated from normal human blood using Ficoll purification, and monocytes were enriched from the PBMCs using Stem Cell Technologies Human Monocyte without CD16 Depletion Negative Selection Kits according to the manufacturer's instructions. Monocytes were then slowly frozen and stored in liquid nitrogen. Prior to assay monocytes were thawed and rested overnight at 37° C. in 5% CO₂ in assay media (RPMI 1640 media supplemented with 10% FBS, 50 μg/mL Penicillin, 50 U/mL Streptomycin, 1 mM HEPES, 1× non-essential amino acids, 0.1 mM sodium pyruvate). The following day, monocytes were plated at 4×10⁴ cell/well with or without tumor cells at 4×10⁴ cell/well in 96-well flat bottom plates in assay media described above. After overnight culture, supernatants were harvested, and TNFα levels were determined by AlphaLISA.

[0756] Referring to FIG. 22, the activity of a CEA TLR8 benzazepine agonist conjugate on CEA-expressing CHO cells and on control non-CEA expressing cells was determined. CEA antibody (CEA-G1 WT), HER2 antibody (HER2-G1 WT antibody) and HER2 conjugate (HER2-G1 WT conjugate) were used as controls. The immune-stimulatory compound-linkers in the conjugates used in the study are identified in TABLES 30 and 31. Referring to FIG. 22, only the CEA conjugate exhibited activity, as measured by TNFα production, in the presence of monocytes and tumor cells. The antibodies and conjugates did not stimulate any TNFα production in the presence of CHO cells not expressing detectable CEA. The specificity of the conjugate for its targeted antigen is shown by this example.

[0757] Referring to FIG. 23, SKCO-1 tumor cells were added to monocytes, prepared as described above. SKCO-1 cells express the tumor antigen CEA. Anti-CEA TLR8 benzazepine agonist conjugates, either monospecific or bispecific with CD40, and conjugated to a TLR8 benzazepine agonist, were added. The immune-stimulatory compound-linkers in the conjugates used in the study are identified in TABLES 30 and 31. Anti-CEA×CD40 bispecific antibody was prepared by attaching a CD40 scFv to the C-terminal end of the anti-CEA antibody heavy chain. TNFα production was measured after 24 hours. Both conjugates were active, stimulating production of TNFα in a dose-dependent manner. Notably the bispecific CEA×CD40 conjugate was more active than the monospecific conjugate. In contrast, unconjugated CEA antibody (CEA-G1 WT) and bispecific CEA×CD40 antibody (CEA×CD40) did not stimulate TNFα production.

[0758] Referring to FIG. 24, another study was performed using an anti-TROP2 conjugate and ten different cell lines expressing varying levels of TROP2. The TROP2 antibody (sacituzumab) was conjugated with a TRL8 benzazepine agonist-linker as generally described in Example 15. The immune-stimulatory compound-linkers in the conjugates used in the study are identified in TABLES 30 and 31. As shown in FIG. 24, the activity of the TROP2-TLR8 benzazepine agonist conjugates, as measured by TNFα production, varied in the dose-dependent manner and generally in accordance with the level of TROP2 expression by the cell line. The control cell line, wt CHO, does not express detectable level of TROP2 and little TNFα production was detected.

### Example 57

### TNFα Production by Macrophages was Induced by Immune Stimulatory Conjugates

[0759] This example shows that immune-stimulatory conjugates can increase the production of a pro-inflammatory cytokine, TNFα, by macrophages in the presence of tumor cells expressing the targeted antigen.

[0760] Macrophages were generated as follows: Monocytes were isolated from human peripheral blood mononuclear cells (PBMCs) using magnetic bead-based negative selection and cultured 7 days in the presence of GM-CSF to generate macrophages. Macrophages were plated in 96-well flat bottom microtiter plates (40,000/well). Antigen-expressing tumor cells were then added (40,000/well) along with titrating concentrations of conjugates or unconjugated parental antibodies as controls. After overnight culture, supernatants were harvested, and TNFα levels were determined by AlphaLISA.

[0761] Referring to FIG. 25, a study was performed using an anti-TROP2 conjugate and ten different cell lines expressing varying levels of TROP2. The TROP2 antibody (sacituzumab) was conjugated with a TRL8 benzazepine agonist-linker as generally described in Example 15. The immune-stimulatory compound-linkers in the conjugates used in the study are identified in TABLES 30 and 31. As shown in FIG. 25, the activity of the TROP2-TLR8 benzazepine agonist conjugates, as measured by TNFα production, varied in the dose-dependent manner and generally in accordance with the level of TROP2 expression by the cell line. The control cell line, wt CHO, does not express detectable level of TROP2 and little TNFα production was detected.

### Example 58

### Bispecific Immunostimulatory Conjugates Increase Monocyte-Derived Dendritic Cell Cytokine Release

[0762] This example illustrates that TLR8 bispecific antibody conjugates increase activation of monocyte-derived dendritic cells, as shown by IL-12 production and that addition of a CD40 binding domain to a Her2 antibody increases the potency of the conjugate.

[0763] PBMCs were isolated from normal human leukapheresis product using Ficoll purification, and monocytes were enriched from PBMC using Stem Cell Technologies Human Monocyte without CD16 Depletion Negative Selection Kits according to the manufacturer's instructions. Monocytes were frozen and stored in liquid nitrogen. Seven days prior to assay, monocytes were thawed and differentiated into monocyte derived dendritic cells (mDC). For differentiation, monocytes were plated at a concentration of 1×10⁶ monocytes/mL in X-Vivo15 media supplemented with 10% fetal bovine serum (FBS), 100 ng/mL recombinant human GM-CSF and 10 ng/mL recombinant human IL-4 and incubated at 37° C. in 5% CO₂. On day 4 of differentiation, half of the media was removed and replaced with fresh X-Vivo15 media supplemented with 10% fetal bovine serum (FBS), 100 ng/mL recombinant human GM-CSF and 10 ng/mL recombinant human IL-4 and returned to 37° C. in 5% CO₂.

[0764] mDC were lifted and re-plated on day 7 of differentiation at 4×10⁴ cell/well with 4×10⁴ cell/well Her2 transfected CHO cells or wild type CHO cells in 96-well flat bottom plates in assay media (RPMI 1640 base media supplemented with 10% FBS, 50 μg/mL Penicillin, 50 U/mL Streptomycin, 1 mM HEPES, 1× non-essential amino acids, 0.1 mM sodium pyruvate). Antibodies and antibody conjugates were diluted in assay media and added to co-cultures at final concentrations starting at 667 nM and diluted 5-fold to 0.213 nM in 100 μL/well total volume. Co-cultures were incubated for 24 hours at 37° C. in 5% CO₂ before cell culture supernatants were harvested. IL-12p40 production was assessed in culture supernatants using the Biolegend Human IL-12/IL-23 p40 ELISA Kit according to the manufacturer's instructions. Plates were read using a Perkin Elmer Envision plate reader.

[0765] Bispecific HER2×CD40 recombinant antibody was prepared as described in Example 18. Bispecific HER2×CD40 recombinant antibody conjugate and Her2 recombinant antibody conjugate were prepared by conjugation of a HER2×CD40 bispecific antibody and a HER2 monoclonal antibody to a TLR8 benzazepine agonist and a linker, as generally described in Example 15. The average drug loading was about 4.

[0766] Referring to FIG. 26, a bispecific HER2×CD40 recombinant antibody conjugate was able to stimulate IL-12 production by mDCs in the presence of Her2 positive CHO cells. The bispecific HER2×CD40 recombinant antibody conjugate stimulated less IL-12 production in the absence of Her2 positive CHO cells (i.e., in the presence of HER2 negative CHO cells), showing both binding domains contribute to activity. The HER2 antibody conjugate stimulated less IL-12 production than the bispecific HER2×CD40 conjugate, showing the contribution of the second CD40 binding domain. The control HER2 antibody alone stimulated little IL-12 production by comparison.

### Example 59

### Bispecific and Monospecific Immune Stimulatory Conjugates Increase the Ability of Monocyte-Derived Dendritic Cells to Stimulate T Cells

[0767] This example illustrates that TLR8 antibody conjugates can increase activation of monocyte-derived dendritic cells, as shown by increased activation of T cells, and that a bispecific recombinant antibody having a CD40 binding domain is more potent than a monospecific recombinant antibody.

[0768] Bispecific HER2×CD40 recombinant antibody conjugate and the HER2 monospecific conjugate were prepared as described in Example 58. To measure T cell stimulation, DCs were generated by culturing human monocytes in the presence of GM-CSF and IL-4. On Day 7 of culture, DCs were lifted and re-plated with HER2-expressing tumor cells in the presence of titrating concentrations of the monoclonal antibody or antibody conjugates. After 24 hours of culture, DCs were lifted and combined with mismatched, proliferation dye-labeled T cells. After 7 days of culture, cells were harvested and stained with CD3-PerCP/Cy5.5. Dye dilution as a measure of T cell proliferation was then assessed by flow cytometry.

[0769] Referring to FIG. 27, the bispecific HER2×CD40 recombinant antibody conjugate and the HER2 monospecific conjugate showed increased stimulation of T cell proliferation in the presence of HER2 positive tumor cells as compared to the unconjugated antibodies.

### Example 60

### Bispecific Antibody Conjugate with a CD40 Binding Domain Potentiates CD40 Agonism on B Cells

[0770] This example illustrates that human B cells were activated by a HER2×CD40 bispecific antibody conjugate, that the bispecific antibody conjugate potentiated CD40L agonism and that activation was increased by Fc domain-mediated cross-linking.

[0771] Human B cells were isolated from fresh PBMCs by magnetic bead enrichment and plated in 96-well flat bottom microtiter plates (50,000/well). HER2-expressing tumor cells were then added (50,000/well) along with titrating concentrations of antibody conjugates or unconjugated monoclonal antibodies. In some studies, sCD40L or anti-human F(ab′)₂ was added to cultures. Following overnight culture, B cell expression of CD86 was assessed by flow cytometry.

[0772] Bispecific HER2×CD40 recombinant antibody conjugate and HER2 recombinant antibody conjugate were prepared by conjugation of HER2×CD40 bispecific and a HER2 monoclonal antibody to a TLR8 benzazepine agonist and a linker. Bispecific HER2×CD40 recombinant antibody conjugate and the HER2 monospecific conjugate were prepared as described in Example 58. The average drug loading was about 4.

[0773] Referring to FIG. 28A, a bispecific HER2×CD40 recombinant antibody conjugate increased expression of CD86 activation marker by primary B cells as compared to a monospecific HER2 recombinant antibody conjugate. CD40 monoclonal antibody was used as a positive control.

[0774] Referring to FIG. 28B, addition of CD40L increased activation (CD86 expression) of primary B cells as the amount of bispecific HER2×CD40 recombinant antibody conjugate increased. In contrast, CD86 expression was unchanged in the presence of CD40L and increasing amounts of HER2 monoclonal antibody conjugate.

[0775] Referring to FIG. 28C, addition of anti-human F(ab′)₂ crosslinking antibody increased activation (CD86 expression) with increasing amounts of bispecific HER2×CD40 recombinant antibody conjugate by Fc-medicated crosslinking. In contrast, CD86 expression was largely unchanged in the presence of anti-human F(ab′)₂ crosslinking antibody.

[0776] While aspects of the present disclosure have been shown and described herein, it will be apparent to those skilled in the art that such aspects are provided by way of example only. Numerous variations, changes, and substitutions will now occur to those skilled in the art without departing from the disclosure. It should be understood that various alternatives to the aspects of the disclosure described herein may be employed in practicing the disclosure. It is intended that the following claims define the scope of the disclosure and that methods and structures within the scope of these claims and their equivalents be covered thereby.

What is claimed is:

1. A recombinant bispecific antibody, comprising:
a) a target antigen binding domain, wherein the target antigen binding domain specifically binds to a tumor associated antigen;
b) an effector antigen binding domain, wherein the effector antigen binding domain specifically binds to an antigen on an antigen presenting cell and wherein the antigen is a molecule on the antigen presenting cell;
c) an Fc comprising domain; and
d) an immune-stimulatory compound attached to the recombinant bispecific antibody by a linker;
wherein the recombinant bispecific antibody induces greater immune cell activation when the recombinant bispecific antibody is bound to the tumor associated antigen and to the antigen on the antigen presenting cell as compared to when the recombinant bispecific antibody is bound to the antigen on the antigen presenting cell but not to the tumor associated antigen.

2. A recombinant bispecific antibody, comprising:
a) a target antigen binding domain, wherein the target antigen binding domain specifically binds to a tumor associated antigen;
b) an effector antigen binding domain, wherein the effector antigen binding domain specifically binds to an antigen on an antigen presenting cell and is an antibody antigen binding domain, wherein the antigen is a molecule on the antigen presenting cell; and
c) a domain comprising an Fc region;
wherein the recombinant bispecific antibody induces greater immune cell activation when the recombinant bispecific antibody is bound to the tumor associated antigen and to the antigen on the antigen presenting cell as compared to when the recombinant bispecific antibody is bound to the antigen on the antigen presenting cell but not to the tumor associated antigen.

3. A recombinant bispecific antibody, comprising:
a) a target antigen binding domain, wherein the target antigen binding domain specifically binds to a tumor associated antigen;
b) an effector antigen binding domain, wherein the effector antigen binding domain specifically binds to an antigen on an antigen presenting cell and is an antibody antigen binding domain, wherein the antigen is a molecule on the antigen presenting cell; and
c) a domain comprising an Fc region;
wherein the recombinant bispecific antibody induces greater immune cell activation in the presence of cells having cell surface tumor associated antigen and antigen presenting cells having cell surface antigen as compared to immune cell activation in the absence of cells having cell surface tumor associated antigen.

4. A recombinant bispecific antibody, comprising:
a) a target antigen binding domain, wherein the target antigen binding domain specifically binds to a tumor associated antigen;
b) an effector antigen binding domain, wherein the effector antigen binding domain specifically binds to an antigen on an antigen presenting cell and wherein the antigen is a molecule on the antigen presenting cell; and
c) an Fc comprising domain; and
d) an immune-stimulatory compound attached to the recombinant bispecific antibody by a linker;
wherein the recombinant bispecific antibody induces greater immune cell activation in the presence of cells having cell surface tumor associated antigen and antigen presenting cells having cell surface antigen as compared to immune cell activation in the absence of cells having cell surface tumor associated antigen.

5. The recombinant bispecific antibody of any one of claims 1-4, wherein the immune cell activation is measured by a cytokine release assay.

6. The recombinant bispecific antibody of any one of claims 1, 2, and 5, wherein the immune cell activation by the recombinant bispecific antibody when the recombinant bispecific antibody is bound to the tumor associated antigen and to the antigen on the antigen presenting cell is at least two times, five times, or ten times greater than immune activation by the recombinant bispecific antibody when the recombinant bispecific antibody is bound to the antigen on the antigen presenting cell but not to the tumor associated antigen as measured by the cytokine release assay.

7. The recombinant bispecific antibody of any one of claims 3-5, wherein the immune cell activation by the recombinant bispecific antibody in the presence of cells having cell surface tumor associated antigen and antigen presenting cells having cell surface antigen is at least two times, five times, or ten times greater than immune cell activation by the recombinant bispecific antibody in the absence of the cells having cell surface tumor associated antigen as measured by the cytokine release assay.

8. The recombinant bispecific antibody of any one of claims 1-7, wherein the immune cell activation comprises an increase in one or more of:
a) a secretion of one or more cytokines as measured by the cytokine release assay,
b) a secretion of one or more chemokines as measured by an ELISA immunoassay,
c) an expression level of one or more cell surface proteins associated with immune stimulation as measured by FACS, and
d) an activity of one or more immune cell functions.

9. The recombinant bispecific antibody of claim 8, wherein the activity of one or more immune cell functions comprises antibody-dependent cell-mediated cytotoxicity as measured by an ADCC assay, antibody dependent cellular phagocytosis as measured by an ADCP assay, or antigen cross-presentation as measured by a cross-presentation assay.

10. The recombinant bispecific antibody of claim 9, wherein the recombinant bispecific antibody induces tumor-cell directed antibody-dependent cell-mediated cytotoxicity.

11. The recombinant bispecific antibody of any one of claims 1-10, wherein the Fc comprising domain has one or more amino acid substitutions that decrease the binding affinity to one or more Fcγ receptors as compared to a wild-type Fc comprising domain.

12. The recombinant bispecific antibody of any one of claims 1-11, wherein the effector antigen binding domain has an increased binding affinity to the antigen on the antigen presenting cell as compared to the binding affinity of the effector antigen binding domain of an antibody that lacks the target antigen binding domain.

13. The recombinant bispecific antibody of any one of claims 1-12, wherein a K_{d} of the binding affinity of the effector antigen binding domain of the recombinant bispecific antibody to the antigen on the antigen presenting cell is increased by two times, five times, ten times, fifty times, or one-hundred times compared to the binding affinity of the effector antigen binding domain of an antibody that lacks the target antigen binding domain.

14. The recombinant bispecific antibody of any one of claims 1-13, wherein a K_{d} for binding of the effector antigen binding domain to the antigen on the antigen presenting cell is less than 20 nM, less than 100 nM, or less than 500 nM.

15. The recombinant bispecific antibody of any one of claims 1-14, wherein the Fc comprising domain is linked to the target antigen binding domain and to the effector antigen binding domain.

16. The recombinant bispecific antibody of any one of claims 1-15, wherein the target antigen binding domain comprises an immunoglobulin heavy chain variable region or antigen binding fragment thereof and an immunoglobulin light chain variable region or antigen binding fragment thereof.

17. The recombinant bispecific antibody of any one of claims 1-16, wherein the target antigen binding domain comprises a single chain variable region fragment (scFv).

18. The recombinant bispecific antibody of any one of claims 1-17, wherein the tumor associated antigen is an antigen selected from the group consisting of CD5, CD19, CD20, CD25, CD37, CD30, CD33, CD45, CAMPATH-1, HLD-DR, carcinoembryonic antigen (CEA), TAG-72, EpCAM, MUC1, MUC15, folate-binding protein, A33, G250, prostate-specific membrane antigen (PSMA), ferritin, GD2, GD3, GM2, Le^{y}, CA-125, CA19-9, epidermal growth factor, p185HER2, IL-2 receptor, tenascin, a metalloproteinase, endosialin, vascular endothelial growth factor, avB3, WT1, LMP2, HPV E6, HPV E7, EGFRvIII, Her-2/neu, MAGE A3, p53 nonmutant, NY-ESO-1, MelanA/MART1, Ras mutant, gp100, p53 mutant, PR1, bcr-abl, tyrosinase, survivin, PSA, hTERT, a Sarcoma translocation breakpoint fusion protein, EphA2, PAP, ML-IAP, AFP, ERG, NA17, PAX3, ALK, androgen receptor, cyclin B1, polysialic acid, MYCN, RhoC, TRP-2, fucosyl GM1, mesothelin (MSLN), PSCA, MAGE A1, MAGE-A3, sLe(animal), CYP1B1, PLAV1, GM3, BORIS, Tn, GloboH, ETV6-AML, NY-BR-1, RGS5, SART3, STn, Carbonic anhydrase IX, PAX5, OY-TES1, Sperm protein 17, LCK, HMWMAA, AKAP-4, SSX2, XAGE 1, B7H3, Legumain, Tie 3, Page4, VEGFR2, MAD-CT-1, PDGFR-B, MAD-CT-2, ROR2, CMET, HER3, EPCAM, CA6, NAPI2B, TROP2, CLDN18.2, fibroblast activation protein (FAP), RON, LY6E, FRA, DLL3, PTK7, LIV1, ROR1, Fos-related antigen 1, VEGFR, endoglin, PD-L, CD204, CD206, CD301, VTCN1, and VISTA.

19. The recombinant bispecific antibody of any one of claims 1-18, wherein the tumor associated antigen is Her2/neu or p185HER2.

20. The recombinant bispecific antibody of any one of claims 1-19, wherein the target antigen binding domain comprises the following CDRs:
a) HCDR1 comprising an amino acid sequence of SEQ ID NO: 13;
b) HCDR2 comprising an amino acid sequence of SEQ ID NO: 14;
c) HCDR3 comprising an amino acid sequence of SEQ ID NO: 15;
d) LCDR1 comprising an amino acid sequence of SEQ ID NO: 18;
e) LCDR2 comprising an amino acid sequence of SEQ ID NO: 19; and
f) LCDR3 comprising an amino acid sequence of SEQ ID NO: 20; and wherein the recombinant bispecific antibody specifically binds to Her2/neu or p185HER2.

21. The recombinant bispecific antibody of claim 20, wherein the target antigen binding domain comprises:
a) a VH sequence having at least 80% sequence identity to an amino acid sequence of SEQ ID NO: 12; and
b) a VL sequence having at least 80% sequence identity to an amino acid sequence of SEQ ID NO: 17.

22. The recombinant bispecific antibody of claim 20, wherein the target antigen binding domain comprises:
a) a heavy chain sequence having at least 80% sequence identity to an amino acid sequence of SEQ ID NO: 11; and
b) a light chain sequence having at least 80% sequence identity to an amino acid sequence of SEQ ID NO: 16.

23. The recombinant bispecific antibody of claim 20, wherein the target antigen binding domain comprises at least 80% sequence identity to the amino acid sequence between amino acid 20 and amino acid 110 of SEQ ID NO: 12 and at least 80% sequence identity to the amino acid sequence between amino acid 20 and amino acid 105 of SEQ ID NO: 17; and wherein the recombinant bispecific antibody specifically binds to Her2/neu or p185HER2.

24. The recombinant bispecific antibody of any one of claims 1-23, wherein the effector antigen binding domain comprises an immunoglobulin heavy chain variable region or antigen binding fragment thereof and an immunoglobulin light chain variable region or antigen binding fragment thereof.

25. The recombinant bispecific antibody of any one of claims 1-24, wherein the effector antigen binding domain comprises a single chain variable region fragment (scFv).

26. The recombinant bispecific antibody of claim 25, wherein the scFv comprises at least 80% sequence identity to an amino acid sequence of SEQ ID NO: 1312.

27. The recombinant bispecific antibody of any one of claims 1-26, wherein the antigen presenting cell is a dendritic cell.

28. The recombinant bispecific antibody on any one of claims 1-27, wherein the antigen on the antigen presenting cell is a costimulatory molecule.

29. The recombinant bispecific antibody of any one of claims 1-28, wherein the antigen on the antigen presenting cell is selected from the group consisting of CD40, OX40L, DEC-205, 4-1BBL, CD36, CD204, MARCO, DC-SIGN, CLEC9A, CLEC5A, Dectin 2, CLEC10A, CD206, CD64, CD32A, CD1A, HVEM, CD32B, PD-L1, or BDCA-2.

30. The recombinant bispecific antibody of any one of claims 1-29, wherein the effector antigen binding domain is a CD40 agonist.

31. The recombinant bispecific antibody of any one of claims 1-30, wherein the effector antigen binding domain comprises the following CDRs:
a) HCDR1 comprising an amino acid sequence of SEQ ID NO: 3;
b) HCDR2 comprising an amino acid sequence of SEQ ID NO: 4;
c) HCDR3 comprising an amino acid sequence of SEQ ID NO: 5;
d) LCDR1 comprising an amino acid sequence of SEQ ID NO: 8;
e) LCDR2 comprising an amino acid sequence of SEQ ID NO: 9; and
f) LCDR3 comprising an amino acid sequence of SEQ ID NO: 10.

32. The recombinant bispecific antibody of claim 31, wherein the effector antigen binding domain comprises:
a) a V_{H} sequence having at least 80% sequence identity to an amino acid sequence of SEQ ID NO: 2; and
b) a VL sequence having at least 80% sequence identity to an amino acid sequence of SEQ ID NO: 7.

33. The recombinant bispecific antibody of claim 31, wherein the effector antigen binding domain comprises:
a) a heavy chain sequence having at least 80% sequence identity to an amino acid sequence of SEQ ID NO: 1; and
b) a light chain having at least 80% sequence identity to an amino acid sequence of SEQ ID NO: 6.

34. The recombinant bispecific antibody of any one of claims 1-27, wherein the antigen on the antigen presenting cell is TREM2 or TNFR2.

35. The recombinant bispecific antibody of any one of claims 1-34, wherein the Fc comprising domain is linked C-terminal to the target antigen binding domain and N-terminal to the effector antigen binding domain.

36. The recombinant bispecific antibody of any one of claims 1-35, wherein the Fc comprising domain comprises one or more amino acid substitutions that reduce the affinity of the Fc comprising domain to an Fc receptor compared to the affinity of a reference Fc comprising domain to the Fc receptor in the absence of the one or more amino acid substitutions.

37. The recombinant bispecific antibody of claim 36, wherein reference Fc comprising domain is selected from the group consisting of an Fc comprising domain having the amino acid sequence of SEQ ID NO: 1314, SEQ ID NO: 1315, SEQ ID NO: 1316, and SEQ ID NO: 1317.

38. The recombinant bispecific antibody of claim 36, wherein reference Fc comprising domain comprises an amino acid sequence selected from the group consisting of SEQ ID NO: 1319, SEQ ID NO: 1320, SEQ ID NO: 1321, and SEQ ID NO: 1322.

39. The recombinant bispecific antibody of any one of claims 1-38, wherein the Fc comprising domain comprises a human IgG₁ Fc Region.

40. The recombinant bispecific antibody of claim 39, wherein the one or more amino acid substitutions comprise L234A, L235A, G237A, and K322A, according to the EU index of Kabat.

41. The recombinant bispecific antibody of claim 41, wherein the one or more amino acid substitutions comprise E233P, L234V, L235A, AG236, A327G, A330S, and P331S, according to the EU index of Kabat.

42. The recombinant bispecific antibody of any one of claims 1-36, wherein the Fc comprising domain comprises a human IgG₂ Fc Region.

43. The recombinant bispecific antibody of claim 42, wherein the one or more amino acid substitutions comprises K322A, according to the EU index of Kabat.

44. The recombinant bispecific antibody of any one of claims 1-36, wherein the Fc comprising domain comprises a human IgG₂ₐ Fc Region.

45. The recombinant bispecific antibody of claim 44, wherein the one or more amino acid substitutions comprises L235E, E318A, K320A, K322A, according to the EU index of Kabat.

46. The recombinant bispecific antibody of any of claims 1-36, wherein the Fc comprising domain is an Fc null.

47. The recombinant bispecific antibody of any one of claims 1-36 and 46, wherein the Fc comprising domain has the amino acid sequence of SEQ ID NO: 1313.

48. The recombinant bispecific antibody of any one of claims 1-36 and 46, wherein the Fc comprising domain comprises the amino acid sequence of SEQ ID NO: 1318.

49. The recombinant bispecific antibody of any one of claims 1-21, wherein the Fc comprising domain is linked C-terminal to the target antigen binding domain and has the amino acid sequence of SEQ ID NO: 1311.

50. The recombinant bispecific antibody of any one of claims 1 and 4-49, wherein the linker links the immune-stimulatory compound to the Fc comprising domain.

51. The recombinant bispecific antibody of any of claims 2, 3, and 5-50, further comprising an immune stimulatory compound and a linker, wherein the linker links the immune-stimulatory compound to the Fc comprising domain.

52. The recombinant bispecific antibody of any one of claims 1 and 4-52, wherein the immune-stimulatory compound is a damage-associated molecular pattern molecule or a pathogen-associated molecular pattern molecule.

53. The recombinant bispecific antibody of any one of claims 1 and 4-53, wherein the immune-stimulatory compound is a Toll-like receptor agonist, STING agonist, or RIG-I agonist.

54. The recombinant bispecific antibody of any one of claims 3-55, wherein the immune-stimulatory compound is a CpG oligonucleotide, Poly G10, Poly G3, Poly I:C, Lipopolysaccharide, zymosan, flagellin, Pam3CSK4, PamCysPamSK4, dsRNA, a diacylated lipopeptide, a triacylated lipoprotein, lipoteichoic acid, a peptidoglycan, a cyclic dinucleotide, a 5′ppp-dsRNA, S-27609, CL307, UC-IV150, imiquimod, gardiquimod, resiquimod, motolimod, VTS-1463GS-9620, GSK2245035, TMX-101, TMX-201, TMX-202, isatoribine, AZD8848, MEDI9197, 3M-051, 3M-852, 3M-052, 3M-854A, S-34240, KU34B, SB9200, SB11285, 8-substituted imidazo[1,5-a]pyridine, or CL663.

55. The recombinant bispecific antibody of any one of claims 1 and 4-53, wherein the immune-stimulatory compound is an inhibitor of TGFB, Beta-Catenin, PI3K-beta, STAT3, IL-10, IDO, or TDO.

56. The recombinant bispecific antibody of any one of claims 1 and 4-53, wherein the immune-stimulatory compound is LY2109761, GSK263771, iCRT3, iCRT5, iCRT14, LY2090314, CGX-1321, PRI-724, BC21, ZINCO2092166, LGK974, IWP2, LY3022859, LY364947, SB431542, AZD8186, SD-208, indoximod (NLG8189), F001287, GDC-0919, epacadostat (INCB024360), RG70099, 1-methyl-L-tryptophan, methylthiohydantoin tryptophan, brassinin, annulin B, exiguamine A, PIM, LM10, 8-substituted 2-amino-3H-benzo[b]azepine-4-carboxamide, or INCB023843.

57. The recombinant bispecific antibody of any one of claims 1 and 4-56, wherein the immune-stimulatory compound does not reduce the affinity of the recombinant bispecific antibody for binding to the tumor associated antigen or to the antigen on the antigen presenting cell.

58. The recombinant bispecific antibody of any one of claims 1-57, further comprising a chemotherapeutic compound and a linker, wherein the linker links the chemotherapeutic compound to the Fc comprising domain.

59. The recombinant bispecific antibody of claim 58, wherein the chemotherapeutic compound comprises an alkylating agent, an anthracycline, a cytoskeletal disruptor, a histone deacetylase inhibitor, an inhibitor of, a kinase inhibitor, a nucleoside analog or precursor analog, a peptide antibiotic, a platinum-based compound, or a plant alkaloid.

60. A method of making a recombinant bispecific antibody comprising:
a) producing an antibody construct comprising:
i) a target antigen binding domain, wherein the target antigen binding domain specifically binds to a tumor associated antigen;
ii) an effector antigen binding domain, wherein the effector antigen binding domain specifically binds to an antigen on an antigen presenting cell and the antigen is a molecule on the antigen presenting cell, wherein the antigen is a molecule on the antigen presenting cell;
iii) an Fc comprising domain; and
b) linking an immune-stimulatory compound to the antibody construct, wherein the recombinant bispecific antibody induces greater immune cell activation when the recombinant bispecific antibody is bound to the tumor associated antigen and to the antigen on the antigen presenting cell as compared to when the recombinant bispecific antibody is bound to the antigen on the antigen presenting cell but not to the tumor associated antigen.

61. A pharmaceutical composition comprising the recombinant bispecific antibody of any of claims 1-59 and a pharmaceutically acceptable carrier.

62. A method of treating a subject in need thereof, comprising administering to the subject a therapeutic dose of the recombinant bispecific antibody of any of claims 1-59 or the pharmaceutical composition of claim 61.

63. The method of claim 62, wherein the subject has cancer.

64. The method of any one of claims 62-63, wherein the recombinant bispecific antibody or the pharmaceutical composition is administered intravenously, cutaneously, subcutaneously, or injected at a site of affliction.

65. The method of any one of claims 62-64, wherein the recombinant bispecific antibody induces greater immune activation against a cancer as measured by a decrease in cancer cell number or volume as compared to non-cancerous tissue.

66. The method of any one of claims 62-65, wherein when the recombinant bispecific antibody is administered intravenously to the subject at a minimum anticipated biological effect level of the recombinant bispecific antibody, a biological effect of the recombinant bispecific antibody is greater when the recombinant bispecific antibody is bound to the tumor associated antigen and to the antigen on the antigen presenting cell as compared to the biological effect of the recombinant bispecific antibody when it is not bound to the tumor associated antigen but is bound to the antigen on the antigen presenting cell; and wherein the biological effect is immune activation as measured by one or more of the group selected from secretion of one or more cytokines, secretion of one or more chemokines, expression level of one or more cell surface proteins associated with immune stimulation, antibody-dependent cell-mediated cytotoxicity, antibody dependent cellular phagocytosis, and antigen cross-presentation.

67. The method of claim 66, wherein when the recombinant bispecific antibody is administered intravenously to the subject at the minimum anticipated biological effect level of the recombinant bispecific antibody, it induces a greater biological effect at the site of the cancer than at a non-cancerous site and wherein the biological effect is immune activation as measured by one or more of the group selected from secretion of one or more cytokines, secretion of one or more chemokines, expression level of one or more cell surface proteins associated with immune stimulation, antibody-dependent cell-mediated cytotoxicity, antibody dependent cellular phagocytosis, and antigen cross-presentation.

68. A conjugate comprising:
a) an antibody construct comprising:
i) first binding domain, wherein the first binding domain specifically binds to a tumor antigen;
ii) a second binding domain, wherein the second binding domain specifically binds to an antigen on an antigen presenting cell, wherein the antigen is a molecule on the antigen presenting cell; and
iii) an Fc domain;
b) an immune-stimulatory compound; and
c) a linker attaching the antibody construct to the immune-stimulatory compound, wherein the linker is covalently bound to the antibody construct and the linker is covalently bound to the immune-stimulatory compound, and wherein a molar ratio of immune-stimulatory compound to antibody construct is less than 8;
wherein the first binding domain is attached to the Fc domain and the second binding domain is attached to the Fc domain or to a C-terminal end of a light chain of the first binding domain;
wherein a K_{d} for binding of the Fc domain to an Fc receptor in a presence of the first binding domain and the second binding domain is no greater than about 100 times a K_{d} for binding of the Fc domain to the Fc receptor in an absence of the second binding domain; and
wherein immune cell activation caused by the conjugate when bound to the tumor antigen as measured by a cytokine release assay is greater than immune cell activation in the absence of binding to the tumor antigen.

69. A conjugate comprising:
a) an antibody construct comprising:
i) first binding domain, wherein the first binding domain specifically binds to a tumor antigen;
ii) a second binding domain, wherein the second binding domain specifically binds to an antigen on an antigen presenting cell, wherein the antigen is a molecule on the antigen presenting cell; and
iii) an Fc domain;
b) an immune-stimulatory compound; and
c) a linker attaching the antibody construct to the immune-stimulatory compound, wherein the linker is covalently bound to the antibody construct and the linker is covalently bound to the immune-stimulatory compound, and wherein a molar ratio of immune-stimulatory compound to antibody construct is less than 8;
wherein the first binding domain is attached to the Fc domain and the second binding domain is attached to the Fc domain or to a C-terminal end of a light chain of the first binding domain;
wherein a K_{d} for binding of the Fc domain to an Fc receptor in a presence of the first binding domain and the second binding domain is no greater than about 100 times a K_{d} for binding of the Fc domain to the Fc receptor in an absence of the second binding domain; and
wherein antigen presenting cells are conditionally activated when the conjugate is bound to the tumor antigen as measured by a cytokine release assay.

70. An antibody construct comprising:
a) a first binding domain, wherein the first binding domain specifically binds to a tumor antigen;
b) a second binding domain, wherein the second binding domain specifically binds to an antigen on an antigen presenting cell, wherein the antigen is a molecule on the antigen presenting cell; and
c) an Fc domain;
wherein the first binding domain is attached to the Fc domain and the second binding domain is attached to the Fc domain or to a C-terminal end of a light chain of the first binding domain, and wherein a K_{d} for binding of the Fc domain to an Fc receptor in a presence of the first binding domain and the second binding domain is no greater than about 100 times a K_{d} for binding of the Fc domain to the Fc receptor in an absence of the second binding domain.

71. An antibody construct for use in inducing immune cell activation comprising:
a) a first binding domain, wherein the first binding domain specifically binds to a tumor antigen;
b) a second binding domain, wherein the second binding domain specifically binds to an antigen on an antigen presenting cell, wherein the antigen is a molecule on the antigen presenting cell; and
c) an Fc domain;
wherein the first binding domain is attached to the Fc domain and the second binding domain is attached to the Fc domain or to a C-terminal end of a light chain of the first binding domain, and wherein a K_{d} for binding of the Fc domain to an Fc receptor in a presence of the first binding domain and the second binding domain is no greater than about 100 times a K_{d} for binding of the Fc domain to the Fc receptor in an absence of the second binding domain; and
wherein immune cell activation caused by the antibody construct upon binding to tumor antigen as measured by a cytokine release assay is greater than immune cell activation caused by the antibody construct in the absence of binding to tumor antigen.

72. A conjugate for use in inducing immune cell activation comprising:
a) an antibody construct comprising:
i) first binding domain, wherein the first binding domain specifically binds to a tumor antigen;
ii) a second binding domain, wherein the second binding domain specifically binds to an antigen on an antigen presenting cell, wherein the antigen is a molecule on the antigen presenting cell; and
iii) an Fc domain;
b) an immune-stimulatory compound; and
c) a linker attaching the antibody construct to the immune-stimulatory compound, wherein the linker is covalently bound to the antibody construct and the linker is covalently bound to the immune-stimulatory compound, and wherein a molar ratio of immune-stimulatory compound to antibody construct is less than 8;
wherein the first binding domain is attached to the Fc domain and the second binding domain is attached to the Fc domain or to a C-terminal end of a light chain of the first binding domain;
wherein a K_{d} for binding of the Fc domain to an Fc receptor in a presence of the first binding domain and the second binding domain is no greater than about 100 times a K_{d} for binding of the Fc domain to the Fc receptor in an absence of the second binding domain; and
wherein immune cell activation caused by the conjugate when bound to the tumor antigen as measured by a cytokine release assay is greater than immune cell activation in the absence of binding to the tumor antigen.

73. A conjugate for use in conditionally activating an antigen presenting cell comprising:
a) an antibody construct comprising:
i) first binding domain, wherein the first binding domain specifically binds to a tumor antigen;
ii) a second binding domain, wherein the second binding domain specifically binds to an antigen on the antigen presenting cell, and
iii) an Fc domain;
b) an immune-stimulatory compound; and
c) a linker attaching the antibody construct to the immune-stimulatory compound, wherein the linker is covalently bound to the antibody construct and the linker is covalently bound to the immune-stimulatory compound, and wherein a molar ratio of immune-stimulatory compound to antibody construct is less than 8;
wherein the first binding domain is attached to the Fc domain and the second binding domain is attached to the Fc domain or to a C-terminal end of a light chain of the first binding domain;
wherein a K_{d} for binding of the Fc domain to an Fc receptor in a presence of the first binding domain and the second binding domain is no greater than about 100 times a K_{d} for binding of the Fc domain to the Fc receptor in an absence of the second binding domain; and
wherein antigen presenting cells are conditionally activated when the conjugate is bound to the tumor antigen as measured cytokine release assay.

74. The conjugate of any one of claims 68-69 or 72-73, wherein a K_{d} for binding of the first binding domain to the tumor antigen in the presence of the immune-stimulatory compound is no greater than about two times, five times, ten times, or fifty times a K_{d} for binding of the first binding domain to the tumor antigen in an absence of the immune-stimulatory compound.

75. The conjugate of any one of claims 68-69 or 72-74, wherein a Kd for binding of the second binding domain to the antigen on the antigen presenting cell in the presence of the immune-stimulatory compound is no greater than about two times, five times, ten times, or fifty times a Kd for binding of the second binding domain to the antigen on the antigen presenting cell in an absence of the immune-stimulatory compound.

76. The antibody construct or conjugate of any one of claims 68-75, wherein a Kd for binding of the first binding domain to the tumor antigen is no greater than about 100 nM.

77. The antibody construct or conjugate of any one of claims 68-76, wherein a Kd for binding of the second binding domain to the antigen on an antigen presenting cell is no greater than about 100 nM.

78. The antibody construct or conjugate of any one of claims 68-77, wherein an amino acid sequence of the tumor antigen has at least 80% sequence identity with the amino acid sequence of a tumor antigen selected from the group consisting of HER2, IL-2 receptor, EGFRvIII (de2-7 EGFR), EGFR, fibroblast activation protein (FAP), tenascin, a metalloproteinase, endosialin, vascular endothelial growth factor, αvβ3, WT1, LMP2, HPV E6, HPV E7, Her-2/neu, p53 nonmutant, NY-ESO-1, GLP-3, MelanA/MART1, Ras mutant, gp100, p53 mutant, PR1, bcr-abl, tyrosinase, survivin, PSA, hTERT, a Sarcoma translocation breakpoint fusion protein, EphA2, PAP, ML-IAP, AFP, ERG, NA17, PAX3, ALK, androgen receptor, cyclin B1, MYCN, RhoC, TRP-2, mesothelin (MSLN), PSCA, MAGE A1, MAGE-A3, CYP1B1, PLAV1, BORIS, ETV6-AML, NY-BR-1, RGS5, SART3, Carbonic anhydrase IX, PAX5, OY-TES1, Sperm protein 17, LCK, MAGE C2, MAGE A4, GAGE, TRAIL1, HMWMAA, AKAP-4, SSX2, XAGE 1, B7H3, Legumain, Tie 3, PAGE4, VEGFR2, MAD-CT-1, PDGFR-B, MAD-CT-2, ROR2, CMET, HER3, EPCAM, CA6, NAPI2B, TROP2, Claudin-6 (CLDN6), Claudin-16 (CLDN16), CLDN18.2, RON, LY6E, FRA, DLL3, PTK7, Uroplakin-1B (UPK1B), LIV1, ROR1, STRA6, TMPRSS3, TMPRSS4, TMEM238, C1orf186, Fos-related antigen 1, VEGFR1, endoglin, PD-L, VTCN1 (B7-H4), VISTA, or a fragment thereof, and a fragment thereof.

79. The antibody construct or conjugate of any one of claims 68-79, wherein an amino acid sequence of the tumor antigen has at least 80% sequence identity with the amino acid sequence of a tumor antigen selected from TABLE 1.

80. The antibody construct or conjugate of any one of claims 68-77, wherein an amino acid sequence of the tumor antigen has at least 80% sequence identity with the amino acid sequence of a tumor antigen selected from the group consisting of HER2, EGFR, CMET, HER3, MUC1, MUC16, EPCAM, MSLN, CA6, NAPI2B, TROP2, CEA, CLDN18.2, EGFRvIII, FAP, EphA2, RON, LY6E, FRA, PSMA, DLL3, PTK7, LIV1, ROR1, MAGE-A3, NY-ESO-1, Endoglin, CD204, CD206, CD301, VTCN1, VISTA, GLP-3, CLDN6, CLDN16, UPK1B, STRA6, TMPRSS3, TMPRSS4, TMEM238, C1orf186, and LRRC15, but not HER2 when the second binding domain specifically binds to CD40.

81. The antibody construct or conjugate of any one of claims 68-81, wherein an amino acid sequence of the antigen on the antigen presenting cell has at least 80% sequence identity with the amino acid sequence of an antigen selected from the group consisting of CD40, DEC-205, CD36 mannose scavenger receptor 1, CLEC9A, DC-SIGN, CLEC12A, BDCA-2, OX40L, 41BBL, CD204, MARCO, CLEC5A, Dectin 1, Dectin 2, CLEC10A, CD206, CD64, CD32A, CD16A, HVEM, PD-L1, CD32B, and CD47, but not CD40 when the first binding domain specifically binds to HER2.

82. The antibody construct or conjugate of any one of claims 68-81, wherein an amino acid sequence of the antigen on the antigen presenting cell has at least 80% sequence identity with the amino acid sequence of an antigen selected from TABLE 2.

83. The antibody construct or conjugate of any one of claims 68-82, wherein the second binding domain is a CD40 agonist.

84. The antibody construct or conjugate of any one of claims 68-83, wherein the first binding domain comprises a single chain variable fragment (scFv).

85. The antibody construct or conjugate of any one of claims 68-84, wherein the second binding domain is a single chain variable fragment (scFv).

86. The antibody construct or conjugate of any one of claims 68-85, wherein the second binding domain comprises a single chain variable fragment from an anti-CD40 antibody, an anti-DEC-205 antibody, an anti-CD36 mannose scavenger receptor 1 antibody, an anti-DC-SIGN antibody, an anti-CLEC9A antibody, an anti-CLEC12A antibody, an anti-BDCA-2 antibody, an anti-OX40L antibody, an anti-41BBL antibody, an anti-CD204 antibody, an anti-MARCO antibody, an anti-CLEC5A antibody, an anti-Dectin 1 antibody, an anti-Dectin 2 antibody, an anti-CLEC10A antibody, an anti-CD206 antibody, an anti-CD64 antibody, an anti-CD32A antibody, an anti-CD16A antibody, an anti-HVEM antibody, an anti-PD-L1, or an anti-CD32B antibody.

87. The antibody construct or conjugate of any one of claims 68-86, wherein the second binding domain is attached to the Fc domain or the light chain of the first binding domain:
a) as an Fc domain-second binding domain fusion peptide;
b) as a light chain-second binding domain fusion peptide; or
c) by a conjugation via a first linker.

88. The antibody construct or conjugate of any one of claims 68-87, wherein the Fc domain is attached to the first binding domain:
a) as an Fc domain-first binding domain fusion peptide; or
b) by conjugation via a second linker.

89. The antibody construct or conjugate of any one of claims 68-88, wherein the Fc domain is attached to both the first binding domain and to the second binding domain as a first binding domain-Fc domain-second binding domain fusion peptide.

90. The antibody construct or conjugate of any one of claims 68-89, wherein the first binding domain is attached to both the Fc domain and the second binding domain as a first binding domain-second binding domain-Fc domain fusion peptide.

91. The antibody construct or conjugate of any one of claims 68-90, wherein the first binding domain and the Fc domain comprise an antibody and the second binding domain comprises a single chain variable fragment (scFv).

92. The antibody construct or conjugate of any one of claims 68-91, wherein the first binding domain has a set of variable region CDR sequences that comprises a set of variable region CDR sequences set forth in TABLE 3 or TABLE 4.

93. The antibody construct or conjugate of any one of claims 68-92, wherein the second binding domain comprises a variable domain comprising a set of CDR sequences set forth in TABLE 11 or TABLE 12.

94. The antibody construct or conjugate of any one of claims 68-93, wherein the first binding domain comprises a variable region comprising VH and VL sequences at least 80% sequence identity to a pair of VH and VL sequences set forth in TABLE 5 or TABLE 6.

95. The antibody construct or conjugate of any one of claims 68-94, wherein the second binding domain comprises a variable region having VH and VL sequences having at least 80% sequence identity to a VH or VL sequence set forth in TABLE 13 or TABLE 14.

96. The antibody construct or conjugate of any one of claims 68-95, wherein the first binding domain comprises an amino acid sequence having at least 80% sequence identity to any sequence in TABLE 7 or TABLE 8.

97. The antibody construct or conjugate of any one of claims 68-96, wherein the second binding domain comprises an amino acid sequence having at least 80% sequence identity to any sequence in TABLE 15 or TABLE 16.

98. The second binding domain-Fc domain-first binding domain fusion peptide of claim 89 comprising an amino acid sequence having at least 80% sequence identity to a sequence in TABLE 9, TABLE 10, or TABLE 17.

99. The second binding domain-first binding domain-Fc domain fusion peptide of claim 90 comprising an amino acid sequence having at least 80% sequence identity to a sequence in TABLE 18 or TABLE 19.

100. A conjugate comprising:
a) an immune-stimulatory compound;
b) an antibody construct comprising a first binding domain and an Fc domain, wherein the first binding domain specifically binds to an antigen expressed on a cell, wherein the amino acid sequence of the antigen has at least 80% homology to the amino acid sequence of an antigen selected from a group consisting of Endoglin, CD204, CD206, CD301, VTCN1, VISTA, GLP-3, CLDN6, CLDN16, UPK1B, STRA6, TMPRSS3, TMPRSS4, TMEM238, C1orf186, LRRC15, DEC-205, CD36 mannose scavenger receptor 1, CLEC9A, DC-SIGN, CLEC12A, BDCA-2, 41BBL, MARCO, CLEC5A, Dectin 1, Dectin 2, CD64, CD32A, CD16A, HVEM, and CD32B, and a fragment thereof; and
c) a linker attaching the antibody construct to the immune-stimulatory compound, wherein the linker is covalently bound to the antibody construct and the linker is covalently bound to the immune-stimulatory compound, and wherein a molar ratio of immune-stimulatory compound to antibody construct is less than 8.

101. A conjugate comprising:
a) an immune-stimulatory compound;
b) an antibody construct comprising a first binding domain and an Fc domain, wherein:
i) the first binding domain specifically binds to an antigen, wherein the amino acid sequence of the antigen has at least 80% homology to the amino acid sequence of an antigen selected from a group consisting of endoglin, PD-L1, CD204, CD206, CD301, VTCN1, VISTA, GLP-3, CLDN6, CLDN16, UPK1B, STRA6, TMPRSS3, TMPRSS4, TMEM238, C1orf186, LRRC15, DEC-205, CD36 mannose scavenger receptor 1, CLEC9A, DC-SIGN, CLEC12A, BDCA-2, OX40L, 41BBL, MARCO, CLEC5A, Dectin 1, Dectin 2, CD64, CD32A, CD16A, HVEM, CD32B, and CD47, and a fragment thereof,
ii) a K_{d} for binding of the first binding domain to the antigen in a presence of the immune-stimulatory compound is less than about 100 nM and no greater than about 100 times a K_{d} for binding of the first binding domain to the antigen in the absence of the immune-stimulatory compound, and
iii) a K_{d} for binding of the Fc domain to an Fc receptor in the presence of the immune-stimulatory compound is no greater than about 100 times a K_{d} for binding of the Fc domain to the Fc receptor in the absence of the immune-stimulatory compound; and
c) a linker attaching the antibody construct to the immune-stimulatory compound, wherein the linker is covalently bound to the antibody construct and the linker is covalently bound to the immune-stimulatory compound, and wherein a molar ratio of immune-stimulatory compound to antibody construct is less than 8.

102. A conjugate comprising:
a) an immune-stimulatory compound;
b) an antibody construct comprising a first binding domain and an Fc domain, wherein:
i) the first binding domain comprises a variable region comprising a set of CDR sequences that comprises at least 80% sequence identity to a set of variable region CDR sequences set forth in TABLE 3 or TABLE 11;
ii) a K_{d} for binding of the first binding domain to the antigen in a presence of the immune-stimulatory compound is less than about 100 nM and no greater than about 100 times a K_{d} for binding of the first binding domain to the antigen in the absence of the immune-stimulatory compound, and
iii) a K_{d} for binding of the Fc domain to an Fc receptor in the presence of the immune-stimulatory compound is no greater than about 100 times a K_{d} for binding of the Fc domain to the Fc receptor in the absence of the immune stimulatory compound; and
c) a linker attaching the antibody construct to the immune-stimulatory compound, wherein the linker is covalently bound to the antibody construct and the linker is covalently bound to the immune-stimulatory compound, and wherein a molar ratio of immune-stimulatory compound to antibody construct is less than 8.

103. A conjugate for use in activating an immune cell comprising:
a) an immune-stimulatory compound;
b) an antibody construct comprising a first binding domain and an Fc domain, wherein the first binding domain specifically binds to an antigen expressed on a cell, wherein the amino acid sequence of the antigen has at least 80% homology to the amino acid sequence of an antigen selected from a group consisting of Endoglin, CD204, CD206, CD301, VTCN1, VISTA, GLP-3, CLDN6, CLDN16, UPK1B, STRA6, TMPRSS3, TMPRSS4, TMEM238, C1orf186, LRRC15, DEC-205, CD36 mannose scavenger receptor 1, CLEC9A, DC-SIGN, CLEC12A, BDCA-2, 41BBL, MARCO, CLEC5A, Dectin 1, Dectin 2, CD64, CD32A, CD16A, HVEM, and CD32B, and a fragment thereof; and
c) a linker attaching the antibody construct to the immune-stimulatory compound, wherein the linker is covalently bound to the antibody construct and the linker is covalently bound to the immune-stimulatory compound, and wherein a molar ratio of immune-stimulatory compound to antibody construct is less than 8; and
wherein immune cell activation caused by the conjugate when bound to the tumor antigen as measured by a cytokine release assay is greater than immune cell activation is greater than immune cell activation in the absence of binding to the tumor antigen.

104. A conjugate for use in activating an immune cell comprising:
a) an immune-stimulatory compound;
b) an antibody construct comprising a first binding domain and an Fc domain, wherein:
i) the first binding domain specifically binds to an antigen, wherein the amino acid sequence of the antigen has at least 80% homology to the amino acid sequence of an antigen selected from a group consisting of endoglin, PD-L1, CD204, CD206, CD301, VTCN1, VISTA, GLP-3, CLDN6, CLDN16, UPK1B, STRA6, TMPRSS3, TMPRSS4, TMEM238, C1orf186, LRRC15, DEC-205, CD36 mannose scavenger receptor 1, CLEC9A, DC-SIGN, CLEC12A, BDCA-2, OX40L, 41BBL, MARCO, CLEC5A, Dectin 1, Dectin 2, CD64, CD32A, CD16A, HVEM, CD32B, and CD47, and a fragment thereof,
ii) a K_{d} for binding of the first binding domain to the antigen in a presence of the immune-stimulatory compound is less than about 100 nM and no greater than about 100 times a K_{d} for binding of the first binding domain to the antigen in the absence of the immune-stimulatory compound, and
iii) a K_{d} for binding of the Fc domain to an Fc receptor in the presence of the immune-stimulatory compound is no greater than about 100 times a K_{d} for binding of the Fc domain to the Fc receptor in the absence of the immune-stimulatory compound; and
c) a linker attaching the antibody construct to the immune-stimulatory compound, wherein the linker is covalently bound to the antibody construct and the linker is covalently bound to the immune-stimulatory compound, and wherein a molar ratio of immune-stimulatory compound to antibody construct is less than 8; and
wherein immune cell activation caused by the conjugate when bound to the tumor antigen as measured by a cytokine release assay is greater than immune cell activation is greater than immune cell activation in the absence of binding to the tumor antigen.

105. A conjugate for use in activating an immune cell comprising:
a) an immune-stimulatory compound;
b) an antibody construct comprising a first binding domain and an Fc domain, wherein the first binding domain comprises a variable region comprising a set of CDR sequences that comprises at least 80% sequence identity to a set of variable region CDR sequences set forth in TABLE 3 or TABLE 11;
c) a linker attaching the antibody construct to the immune-stimulatory compound, wherein the linker is covalently bound to the antibody construct and the linker is covalently bound to the immune-stimulatory compound, and wherein a molar ratio of immune-stimulatory compound to antibody construct is less than 8; and
wherein immune cell activation caused by the conjugate when bound to the tumor antigen as measured by a cytokine release assay is greater than immune cell activation is greater than immune cell activation in the absence of binding to the tumor antigen.

106. A conjugate for use in activating an immune cell comprising:
a) an immune-stimulatory compound;
b) an antibody construct comprising a first binding domain and an Fc domain, wherein:
i) the first binding domain comprises a variable region comprising a set of CDR sequences that comprises at least 80% sequence identity to a set of variable region CDR sequences set forth in TABLE 3 or TABLE 11;
ii) a K_{d} for binding of the first binding domain to the antigen in a presence of the immune-stimulatory compound is less than about 100 nM and no greater than about 100 times a K_{d} for binding of the first binding domain to the antigen in the absence of the immune-stimulatory compound, and
iii) a K_{d} for binding of the Fc domain to an Fc receptor in the presence of the immune-stimulatory compound is no greater than about 100 times a K_{d} for binding of the Fc domain to the Fc receptor in the absence of the immune stimulatory compound; and
c) a linker attaching the antibody construct to the immune-stimulatory compound, wherein the linker is covalently bound to the antibody construct and the linker is covalently bound to the immune-stimulatory compound, and wherein a molar ratio of immune-stimulatory compound to antibody construct is less than 8; and
wherein immune cell activation caused by the conjugate when bound to the tumor antigen as measured by a cytokine release assay is greater than immune cell activation is greater than immune cell activation in the absence of binding to the tumor antigen.

107. The conjugate of any one of claims 100-106, wherein the first binding domain comprises a variable region comprising V_{H} and V_{L} sequences at least 80% sequence identity to a pair of V_{H} and V_{L} sequences set forth in TABLE 5 or TABLE 13.

108. The conjugate of any one of claims 100-107, wherein the first binding domain comprises an amino acid sequence having at least 80% sequence identity to any sequence in TABLE 7 or TABLE 15.

109. The conjugate of any one of claims 68-69 or 72-108, wherein a Kd for binding of the Fc domain to the Fc receptor in the presence of the immune-stimulatory compound is no greater than about two times, five times, ten times, or fifty times a Kd for binding of the Fc domain to the Fc receptor in an absence of the immune-stimulatory compound.

110. The conjugate of any one of claims 68-69 or 72-109, wherein the immune-stimulatory compound is a damage-associated molecular pattern molecule or pathogen-associated molecular pattern molecule.

111. The conjugate of any one of claims 68-69 or 72-110, wherein the immune-stimulatory compound is a toll-like receptor agonist, STING agonist, or RIG-I agonist.

112. The conjugate of any one of claims 68-69 or 72-111, wherein the immune-stimulatory compound is a CpG oligonucleotide, Poly G10, Poly G3, Poly I:C, Lipopolysaccharide, zymosan, flagellin, Pam3CSK4, PamCysPamSK4, dsRNA, a diacylated lipopeptide, a triacylated lipoprotein, lipoteichoic acid, a peptidoglycan, a cyclic dinucleotide, a 5′ppp-dsRNA, S-27609, CL307, UC-IV150, imiquimod, gardiquimod, resiquimod, motolimod, VTS-1463GS-9620, GSK2245035, TMX-101, TMX-201, TMX-202, isatoribine, AZD8848, MEDI9197, 3M-051, 3M-852, 3M-052, 3M-854A, S-34240, KU34B, SB9200, SB11285, 8-substituted imidazo[1,5-a]pyridine, or CL663.

113. The conjugate of any one of claims 68-69 or 72-109, wherein the immune-stimulatory compound is an inhibitor of TGFB, Beta-Catenin, TNIK, Tankyrase, PI3K-beta, STAT3, IL-10, IDO, or TDO.

114. The conjugate of any one of claims 68-69 or 72-109, wherein the immune-stimulatory compound is LY2109761, GSK263771, iCRT3, iCRT5, iCRT14, LY2090314, CGX-1321, PRI-724, BC21, ZINCO2092166, LGK974, IWP2, LY3022859, LY364947, SB431542, AZD8186, SD-208, indoximod (NLG8189), F001287, GDC-0919, epacadostat (INCB024360), RG70099, 1-methyl-L-tryptophan, methylthiohydantoin tryptophan, brassinin, annulin B, exiguamine A, PIM, LM10, 8-substituted 2-amino-3H-benzo[b]azepine-4-carboxamide, or INCB023843.

115. The antibody construct or conjugate of any one of claims 68-69 or 72-114, wherein the Fc domain is an Fc domain variant comprising at least one amino acid residue change as compared to a wild type sequence of the Fc domain.

116. The antibody construct or conjugate of claim 115, wherein the Fc domain variant binds to an Fc receptor with altered affinity as compared to the wild type Fc domain.

117. The antibody construct or conjugate of any one of claims 115-116, wherein the at least one amino acid residue change is selected from a group consisting of:
a) F243L, R292P, Y300L, L235V, and P396L, wherein numbering of amino acid residues in the Fc domain is according to the EU index;
b) S239D and I332E, wherein numbering of amino acid residues in the Fc domain is according to the EU index; and
c) S298A, E333A, and K334A, wherein numbering of amino acid residues in the Fc domain is according to the EU index.

118. The antibody construct or conjugate of any one of claims 68-117, wherein the antibody construct or conjugate induces secretion of cytokines by an immune cell as measured by a cytokine release assay.

119. The antibody construct or conjugate of claim 118, wherein the cytokine is IFN-γ, IL-8, IL-12, IL-2, or a combination thereof.

120. The antibody construct or conjugate of any one of claims 68-119, wherein the antibody construct or conjugate induces antigen presentation on a dendritic cell, B cell, macrophage, or a combination thereof.

121. A method of making a conjugate comprising linking an antibody construct of any one of claims 70-71, 76-99, or 116-120 to an immune stimulatory compound by a linker.

122. A pharmaceutical composition comprising the conjugate or antibody construct of any of claims 68-120 and a pharmaceutically acceptable carrier.

123. A method of treatment for a subject in need thereof, comprising administering a therapeutic dose of the antibody construct or conjugate of any one of claims 68-120 or the pharmaceutical composition of claim 122.

124. The method of claim 123, wherein the subject has cancer.

125. The method of any one of claims 123-124, wherein antibody construct or conjugate is administered intravenously, cutaneously, subcutaneously, or injected at a site of affliction.

126. The method of any one of claims 123-125, wherein after administration of antibody construct or conjugate to the subject, immune cell activation is increased in the subject as measured by a secretion of one or more cytokines as measured by a cytokine release assay, a secretion of one or more chemokines as measured by an ELISA immunoassay, an expression level of one or more cell surface proteins associated with immune stimulation as measured by an ELISA immunoassay, an activity of one or more immune cell functions, or combination thereof, as compared to before administration of the antibody construct or conjugate to the subject.

127. The method of claim 126, wherein the activity of one or more immune cell functions comprises antibody-dependent cell-mediated cytotoxicity as measured by an ADCC assay, antibody dependent cellular phagocytosis as measured by an ADCP assay, or antigen cross-presentation as measured by a cross-presentation assay.

128. The method of any one of claims 123-127, wherein after administration of the antibody construct or conjugate to the subject, tumor cell intracellular signaling is altered in the subject as compared to tumor cell intracellular signaling before administration of the antibody construct or conjugate as measured by an intracellular signaling assay.

129. The method of claim 128, wherein the altered tumor cell intracellular signaling increases tumor immunogenicity as measured by an immunogencity assay.

130. A kit comprising a pharmaceutically acceptable dosage unit of a pharmaceutically effective amount of the conjugate or antibody construct according to any of claims 1-120 or the pharmaceutical composition of claim 122.

The application's sequence listing, which the Patent Office published only in electronic form, follows.

SEQUENCE LISTING (1333 sequences)

SEQ ID NO: 1 - protein, 452 aa, Artificial Sequence
  Description of Artificial Sequence: Synthetic polypeptide
QVQLVQSGAEVKKPGASVKVSCKASGYTFTGYYMHWVRQAPGQGLEWMGWINPDSGGTNYAQKFQGRVTMTRDTSISTAYMELNRLRSDDTAVYYCARDQPLGYCTNGVCSYFDYWGQGTLVTVSSASTKGPSVFPLAPCSRSTSESTAALGCLVKDYFPEPVTVSWNSGALTSGVHTFPAVLQSSGLYSLSSVVTVPSSNFGTQTYTCNVDHKPSNTKVDKTVERKCCVECPPCPAPPVAGPSVFLFPPKPKDTLMISRTPEVTCVVVDVSHEDPEVQFNWYVDGVEVHNAKTKPREEQFNSTFRVVSVLTVVHQDWLNGKEYKCKVSNKGLPAPIEKTISKTKGQPREPQVYTLPPSREEMTKNQVSLTCLVKGFYPSDIAVEWESNGQPENNYKTTPPMLDSDGSFFLYSKLTVDKSRWQQGNVFSCSVMHEALHNHYTQKSLSLSPGK

SEQ ID NO: 2 - protein, 126 aa, Artificial Sequence
  Description of Artificial Sequence: Synthetic polypeptide
QVQLVQSGAEVKKPGASVKVSCKASGYTFTGYYMHWVRQAPGQGLEWMGWINPDSGGTNYAQKFQGRVTMTRDTSISTAYMELNRLRSDDTAVYYCARDQPLGYCTNGVCSYFDYWGQGTLVTVSS

SEQ ID NO: 3 - protein, 8 aa, Artificial Sequence
  Description of Artificial Sequence: Synthetic peptide
GYTFTGYY

SEQ ID NO: 4 - protein, 8 aa, Artificial Sequence
  Description of Artificial Sequence: Synthetic peptide
INPDSGGT

SEQ ID NO: 5 - protein, 19 aa, Artificial Sequence
  Description of Artificial Sequence: Synthetic peptide
ARDQPLGYCTNGVCSYFDY

SEQ ID NO: 6 - protein, 214 aa, Artificial Sequence
  Description of Artificial Sequence: Synthetic polypeptide
DIQMTQSPSSVSASVGDRVTITCRASQGIYSWLAWYQQKPGKAPNLLIYTASTLQSGVPSRFSGSGSGTDFTLTISSLQPEDFATYYCQQANIFPLTFGGGTKVEIKRTVAAPSVFIFPPSDEQLKSGTASVVCLLNNFYPREAKVQWKVDNALQSGNSQESVTEQDSKDSTYSLSSTLTLSKADYEKHKVYACEVTHQGLSSPVTKSFNRGEC

SEQ ID NO: 7 - protein, 107 aa, Artificial Sequence
  Description of Artificial Sequence: Synthetic polypeptide
DIQMTQSPSSVSASVGDRVTITCRASQGIYSWLAWYQQKPGKAPNLLIYTASTLQSGVPSRFSGSGSGTDFTLTISSLQPEDFATYYCQQANIFPLTFGGGTKVEIK

SEQ ID NO: 8 - protein, 6 aa, Artificial Sequence
  Description of Artificial Sequence: Synthetic peptide
QGIYSW

SEQ ID NO: 9 - protein, 3 aa, Artificial Sequence
  Description of Artificial Sequence: Synthetic peptide
TAS

SEQ ID NO: 10 - protein, 9 aa, Artificial Sequence
  Description of Artificial Sequence: Synthetic peptide
QQANIFPLT

SEQ ID NO: 11 - protein, 448 aa, Artificial Sequence
  Description of Artificial Sequence: Synthetic polypeptide
EVQLVESGGGLVQPGGSLRLSCAASGFTFTDYTMDWVRQAPGKGLEWVADVNPNSGGSIYNQRFKGRFTLSVDRSKNTLYLQMNSLRAEDTAVYYCARNLGPSFYFDYWGQGTLVTVSSASTKGPSVFPLAPSSKSTSGGTAALGCLVKDYFPEPVTVSWNSGALTSGVHTFPAVLQSSGLYSLSSVVTVPSSSLGTQTYICNVNHKPSNTKVDKKVEPKSCDKTHTCPPCPAPELLGGPSVFLFPPKPKDTLMISRTPEVTCVVVDVSHEDPEVKFNWYVDGVEVHNAKTKPREEQYNSTYRVVSVLTVLHQDWLNGKEYKCKVSNKALPAPIEKTISKAKGQPREPQVYTLPPSREEMTKNQVSLTCLVKGFYPSDIAVEWESNGQPENNYKTTPPVLDSDGSFFLYSKLTVDKSRWQQGNVFSCSVMHEALHNHYTQKSLSLSPG

SEQ ID NO: 12 - protein, 119 aa, Artificial Sequence [sequence omitted]

SEQ ID NO: 13 - protein, 8 aa, Artificial Sequence
  Description of Artificial Sequence: Synthetic peptide
GFTFTDYT

SEQ ID NO: 14 - protein, 8 aa, Artificial Sequence
  Description of Artificial Sequence: Synthetic peptide
VNPNSGGS

SEQ ID NO: 15 - protein, 12 aa, Artificial Sequence
  Description of Artificial Sequence: Synthetic peptide
ARNLGPSFYFDY

SEQ ID NO: 16 - protein, 214 aa, Artificial Sequence
  Description of Artificial Sequence: Synthetic polypeptide
DIQMTQSPSSLSASVGDRVTITCKASQDVSIGVAWYQQKPGKAPKLLIYSASYRYTGVPSRFSGSGSGTDFTLTISSLQPEDFATYYCQQYYIYPYTFGQGTKVEIKRTVAAPSVFIFPPSDEQLKSGTASVVCLLNNFYPREAKVQWKVDNALQSGNSQESVTEQDSKDSTYSLSSTLTLSKADYEKHKVYACEVTHQGLSSPVTKSFNRGEC

SEQ ID NO: 17 - protein, 107 aa, Artificial Sequence [sequence omitted]

SEQ ID NO: 18 - protein, 6 aa, Artificial Sequence
  Description of Artificial Sequence: Synthetic peptide
QDVSIG

SEQ ID NO: 19 - protein, 3 aa, Artificial Sequence
  Description of Artificial Sequence: Synthetic peptide
SAS

SEQ ID NO: 20 - protein, 9 aa, Artificial Sequence
  Description of Artificial Sequence: Synthetic peptide
QQYYIYPYT

SEQ ID NO: 21 - protein, 711 aa, Artificial Sequence
  Description of Artificial Sequence: Synthetic polypeptide
QVQLVQSGAEVKKPGASVKVSCKASGYTFTGYYMHWVRQAPGQGLEWMGWINPDSGGTNYAQKFQGRVTMTRDTSISTAYMELNRLRSDDTAVYYCARDQPLGYCTNGVCSYFDYWGQGTLVTVSSASTKGPSVFPLAPSSKSTSGGTAALGCLVKDYFPEPVTVSWNSGALTSGVHTFPAVLQSSGLYSLSSVVTVPSSSLGTQTYICNVNHKPSNTKVDKKVEPKSCDKTHTCPPCPAPELLGGPSVFLFPPKPKDTLMISRTPEVTCVVVDVSHEDPEVKFNWYVDGVEVHNAKTKPREEQYNSTYRVVSVLTVLHQDWLNGKEYKCKVSNKALPAPIEKTISKAKGQPREPQVYTLPPSREEMTKNQVSLTCLVKGFYPSDIAVEWESNGQPENNYKTTPPVLDSDGSFFLYSKLTVDKSRWQQGNVFSCSVMHEALHNHYTQKSLSLSPGGGGGSGGGGSEVQLVESGGGLVQPGGSLRLSCAASGFTFTDYTMDWVRQAPGKGLEWVADVNPNSGGSIYNQRFKGRFTLSVDRSKNTLYLQMNSLRAEDTAVYYCARNLGPSFYFDYWGQGTLVTVSSGGGGSGGGGSGGGGSGGGGSDIQMTQSPSSLSASVGDRVTITCKASQDVSIGVAWYQQKPGKAPKLLIYSASYRYTGVPSRFSGSGSGTDFTLTISSLQPEDFATYYCQQYYIYPYTFGQGTKVEIK

SEQ ID NO: 22 - protein, 711 aa, Artificial Sequence
  Description of Artificial Sequence: Synthetic polypeptide
EVQLVESGGGLVQPGGSLRLSCAASGFTFTDYTMDWVRQAPGKGLEWVADVNPNSGGSIYNQRFKGRFTLSVDRSKNTLYLQMNSLRAEDTAVYYCARNLGPSFYFDYWGQGTLVTVSSASTKGPSVFPLAPSSKSTSGGTAALGCLVKDYFPEPVTVSWNSGALTSGVHTFPAVLQSSGLYSLSSVVTVPSSSLGTQTYICNVNHKPSNTKVDKKVEPKSCDKTHTCPPCPAPELLGGPSVFLFPPKPKDTLMISRTPEVTCVVVDVSHEDPEVKFNWYVDGVEVHNAKTKPREEQYNSTYRVVSVLTVLHQDWLNGKEYKCKVSNKALPAPIEKTISKAKGQPREPQVYTLPPSREEMTKNQVSLTCLVKGFYPSDIAVEWESNGQPENNYKTTPPVLDSDGSFFLYSKLTVDKSRWQQGNVFSCSVMHEALHNHYTQKSLSLSPGGGGGSGGGGSQVQLVQSGAEVKKPGASVKVSCKASGYTFTGYYMHWVRQAPGQGLEWMGWINPDSGGTNYAQKFQGRVTMTRDTSISTAYMELNRLRSDDTAVYYCARDQPLGYCTNGVCSYFDYWGQGTLVTVSSGGGGSGGGGSGGGGSGGGGSDIQMTQSPSSVSASVGDRVTITCRASQGIYSWLAWYQQKPGKAPNLLIYTASTLQSGVPSRFSGSGSGTDFTLTISSLQPEDFATYYCQQANIFPLTFGGGTKVEIK

SEQ ID NO: 23 - protein, 477 aa, Artificial Sequence
  Description of Artificial Sequence: Synthetic polypeptide
DIQMTQSPSSLSASVGDRVTITCKASQDVSIGVAWYQQKPGKAPKLLIYSASYRYTGVPSRFSGSGSGTDFTLTISSLQPEDFATYYCQQYYIYPYTFGQGTKVEIKRTVAAPSVFIFPPSDEQLKSGTASVVCLLNNFYPREAKVQWKVDNALQSGNSQESVTEQDSKDSTYSLSSTLTLSKADYEKHKVYACEVTHQGLSSPVTKSFNRGECGGGGSGGGGSQVQLVQSGAEVKKPGASVKVSCKASGYTFTGYYMHWVRQAPGQGLEWMGWINPDSGGTNYAQKFQGRVTMTRDTSISTAYMELNRLRSDDTAVYYCARDQPLGYCTNGVCSYFDYWGQGTLVTVSSGGGGSGGGGSGGGGSGGGGSDIQMTQSPSSVSASVGDRVTITCRASQGIYSWLAWYQQKPGKAPNLLIYTASTLQSGVPSRFSGSGSGTDFTLTISSLQPEDFATYYCQQANIFPLTFGGGTKVEIK

SEQ ID NO: 24 - protein, 449 aa, Artificial Sequence
  Description of Artificial Sequence: Synthetic polypeptide
QVQLKQSGPGLVQPSQSLSITCTVSGFSLTNYGVHWVRQSPGKGLEWLGVIWSGGNTDYNTPFTSRLSINKDNSKSQVFFKMNSLQSNDTAIYYCARALTYYDYEFAYWGQGTLVTVSAASTKGPSVFPLAPSSKSTSGGTAALGCLVKDYFPEPVTVSWNSGALTSGVHTFPAVLQSSGLYSLSSVVTVPSSSLGTQTYICNVNHKPSNTKVDKKVEPKSCDKTHTCPPCPAPELLGGPSVFLFPPKPKDTLMISRTPEVTCVVVDVSHEDPEVKFNWYVDGVEVHNAKTKPREEQYNSTYRVVSVLTVLHQDWLNGKEYKCKVSNKALPAPIEKTISKAKGQPREPQVYTLPPSRDELTKNQVSLTCLVKGFYPSDIAVEWESNGQPENNYKTTPPVLDSDGSFFLYSKLTVDKSRWQQGNVFSCSVMHEALHNHYTQKSLSLSPGK

SEQ ID NO: 25 - protein, 119 aa, Artificial Sequence
  Description of Artificial Sequence: Synthetic polypeptide
QVQLKQSGPGLVQPSQSLSITCTVSGFSLTNYGVHWVRQSPGKGLEWLGVIWSGGNTDYNTPFTSRLSINKDNSKSQVFFKMNSLQSNDTAIYYCARALTYYDYEFAYWGQGTLVTVSA

SEQ ID NO: 26 - protein, 8 aa, Artificial Sequence
  Description of Artificial Sequence: Synthetic peptide
GFSLTNYG

SEQ ID NO: 27 - protein, 7 aa, Artificial Sequence
  Description of Artificial Sequence: Synthetic peptide
IWSGGNT

SEQ ID NO: 28 - protein, 13 aa, Artificial Sequence
  Description of Artificial Sequence: Synthetic peptide
ARALTYYDYEFAY

SEQ ID NO: 29 - protein, 214 aa, Artificial Sequence
  Description of Artificial Sequence: Synthetic polypeptide
DILLTQSPVILSVSPGERVSFSCRASQSIGTNIHWYQQRTNGSPRLLIKYASESISGIPSRFSGSGSGTDFTLSINSVESEDIADYYCQQNNNWPTTFGAGTKLELKRTVAAPSVFIFPPSDEQLKSGTASVVCLLNNFYPREAKVQWKVDNALQSGNSQESVTEQDSKDSTYSLSSTLTLSKADYEKHKVYACEVTHQGLSSPVTKSFNRGEC

SEQ ID NO: 30 - protein, 107 aa, Artificial Sequence
  Description of Artificial Sequence: Synthetic polypeptide
DILLTQSPVILSVSPGERVSFSCRASQSIGTNIHWYQQRTNGSPRLLIKYASESISGIPSRFSGSGSGTDFTLSINSVESEDIADYYCQQNNNWPTTFGAGTKLELK

SEQ ID NO: 31 - protein, 6 aa, Artificial Sequence
  Description of Artificial Sequence: Synthetic peptide
QSIGTN

SEQ ID NO: 32 - protein, 3 aa, Artificial Sequence
  Description of Artificial Sequence: Synthetic peptide
YAS

SEQ ID NO: 33 - protein, 9 aa, Artificial Sequence
  Description of Artificial Sequence: Synthetic peptide
QQNNNWPTT

SEQ ID NO: 34 - protein, 711 aa, Artificial Sequence
  Description of Artificial Sequence: Synthetic polypeptide
QVQLVQSGAEVKKPGASVKVSCKASGYTFTGYYMHWVRQAPGQGLEWMGWINPDSGGTNYAQKFQGRVTMTRDTSISTAYMELNRLRSDDTAVYYCARDQPLGYCTNGVCSYFDYWGQGTLVTVSSASTKGPSVFPLAPSSKSTSGGTAALGCLVKDYFPEPVTVSWNSGALTSGVHTFPAVLQSSGLYSLSSVVTVPSSSLGTQTYICNVNHKPSNTKVDKKVEPKSCDKTHTCPPCPAPELLGGPSVFLFPPKPKDTLMISRTPEVTCVVVDVSHEDPEVKFNWYVDGVEVHNAKTKPREEQYNSTYRVVSVLTVLHQDWLNGKEYKCKVSNKALPAPIEKTISKAKGQPREPQVYTLPPSREEMTKNQVSLTCLVKGFYPSDIAVEWESNGQPENNYKTTPPVLDSDGSFFLYSKLTVDKSRWQQGNVFSCSVMHEALHNHYTQKSLSLSPGGGGGSGGGGSQVQLKQSGPGLVQPSQSLSITCTVSGFSLTNYGVHWVRQSPGKGLEWLGVIWSGGNTDYNTPFTSRLSINKDNSKSQVFFKMNSLQSNDTAIYYCARALTYYDYEFAYWGQGTLVTVSAGGGGSGGGGSGGGGSGGGGSDILLTQSPVILSVSPGERVSFSCRASQSIGTNIHWYQQRTNGSPRLLIKYASESISGIPSRFSGSGSGTDFTLSINSVESEDIADYYCQQNNNWPTTFGAGTKLELK

SEQ ID NO: 35 - protein, 711 aa, Artificial Sequence
  Description of Artificial Sequence: Synthetic polypeptide
QVQLKQSGPGLVQPSQSLSITCTVSGFSLTNYGVHWVRQSPGKGLEWLGVIWSGGNTDYNTPFTSRLSINKDNSKSQVFFKMNSLQSNDTAIYYCARALTYYDYEFAYWGQGTLVTVSAASTKGPSVFPLAPSSKSTSGGTAALGCLVKDYFPEPVTVSWNSGALTSGVHTFPAVLQSSGLYSLSSVVTVPSSSLGTQTYICNVNHKPSNTKVDKKVEPKSCDKTHTCPPCPAPELLGGPSVFLFPPKPKDTLMISRTPEVTCVVVDVSHEDPEVKFNWYVDGVEVHNAKTKPREEQYNSTYRVVSVLTVLHQDWLNGKEYKCKVSNKALPAPIEKTISKAKGQPREPQVYTLPPSREEMTKNQVSLTCLVKGFYPSDIAVEWESNGQPENNYKTTPPVLDSDGSFFLYSKLTVDKSRWQQGNVFSCSVMHEALHNHYTQKSLSLSPGGGGGSGGGGSQVQLVQSGAEVKKPGASVKVSCKASGYTFTGYYMHWVRQAPGQGLEWMGWINPDSGGTNYAQKFQGRVTMTRDTSISTAYMELNRLRSDDTAVYYCARDQPLGYCTNGVCSYFDYWGQGTLVTVSSGGGGSGGGGSGGGGSGGGGSDIQMTQSPSSVSASVGDRVTITCRASQGIYSWLAWYQQKPGKAPNLLIYTASTLQSGVPSRFSGSGSGTDFTLTISSLQPEDFATYYCQQANIFPLTFGGGTKVEIK

SEQ ID NO: 36 - protein, 477 aa, Artificial Sequence
  Description of Artificial Sequence: Synthetic polypeptide
DILLTQSPVILSVSPGERVSFSCRASQSIGTNIHWYQQRTNGSPRLLIKYASESISGIPSRFSGSGSGTDFTLSINSVESEDIADYYCQQNNNWPTTFGAGTKLELKRTVAAPSVFIFPPSDEQLKSGTASVVCLLNNFYPREAKVQWKVDNALQSGNSQESVTEQDSKDSTYSLSSTLTLSKADYEKHKVYACEVTHQGLSSPVTKSFNRGECGGGGSGGGGSQVQLVQSGAEVKKPGASVKVSCKASGYTFTGYYMHWVRQAPGQGLEWMGWINPDSGGTNYAQKFQGRVTMTRDTSISTAYMELNRLRSDDTAVYYCARDQPLGYCTNGVCSYFDYWGQGTLVTVSSGGGGSGGGGSGGGGSGGGGSDIQMTQSPSSVSASVGDRVTITCRASQGIYSWLAWYQQKPGKAPNLLIYTASTLQSGVPSRFSGSGSGTDFTLTISSLQPEDFATYYCQQANIFPLTFGGGTKVEIK

SEQ ID NO: 37 - protein, 445 aa, Artificial Sequence
  Description of Artificial Sequence: Synthetic polypeptide
QVQLQESGPGLVKPSETLSLTCTVSGGSVSSGDYYWTWIRQSPGKGLEWIGHIYYSGNTNYNPSLKSRLTISIDTSKTQFSLKLSSVTAADTAIYYCVRDRVTGAFDIWGQGTMVTVSSASTKGPSVFPLAPCSRSTSESTAALGCLVKDYFPEPVTVSWNSGALTSGVHTFPAVLQSSGLYSLSSVVTVPSSNFGTQTYTCNVDHKPSNTKVDKTVERKCCVECPPCPAPPVAGPSVFLFPPKPKDTLMISRTPEVTCVVVDVSHEDPEVQFNWYVDGVEVHNAKTKPREEQFNSTFRVVSVLTVVHQDWLNGKEYKCKVSNKGLPAPIEKTISKTKGQPREPQVYTLPPSREEMTKNQVSLTCLVKGFYPSDIAVEWESNGQPENNYKTTPPMLDSDGSFFLYSKLTVDKSRWQQGNVFSCSVMHEALHNHYTQKSLSLSPGK

SEQ ID NO: 38 - protein, 119 aa, Artificial Sequence [sequence omitted]

SEQ ID NO: 39 - protein, 10 aa, Artificial Sequence
  Description of Artificial Sequence: Synthetic peptide
GGSVSSGDYY

SEQ ID NO: 40 - protein, 7 aa, Artificial Sequence
  Description of Artificial Sequence: Synthetic peptide
IYYSGNT

SEQ ID NO: 41 - protein, 11 aa, Artificial Sequence
  Description of Artificial Sequence: Synthetic peptide
VRDRVTGAFDI

SEQ ID NO: 42 - protein, 214 aa, Artificial Sequence
  Description of Artificial Sequence: Synthetic polypeptide
DIQMTQSPSSLSASVGDRVTITCQASQDISNYLNWYQQKPGKAPKLLIYDASNLETGVPSRFSGSGSGTDFTFTISSLQPEDIATYFCQHFDHLPLAFGGGTKVEIKRTVAAPSVFIFPPSDEQLKSGTASVVCLLNNFYPREAKVQWKVDNALQSGNSQESVTEQDSKDSTYSLSSTLTLSKADYEKHKVYACEVTHQGLSSPVTKSFNRGEC

SEQ ID NO: 43 - protein, 107 aa, Artificial Sequence [sequence omitted]

SEQ ID NO: 44 - protein, 6 aa, Artificial Sequence
  Description of Artificial Sequence: Synthetic peptide
QDISNY

SEQ ID NO: 45 - protein, 3 aa, Artificial Sequence
  Description of Artificial Sequence: Synthetic peptide
DAS

SEQ ID NO: 46 - protein, 9 aa, Artificial Sequence
  Description of Artificial Sequence: Synthetic peptide
QHFDHLPLA

SEQ ID NO: 47 - protein, 711 aa, Artificial Sequence
  Description of Artificial Sequence: Synthetic polypeptide
QVQLVQSGAEVKKPGASVKVSCKASGYTFTGYYMHWVRQAPGQGLEWMGWINPDSGGTNYAQKFQGRVTMTRDTSISTAYMELNRLRSDDTAVYYCARDQPLGYCTNGVCSYFDYWGQGTLVTVSSASTKGPSVFPLAPSSKSTSGGTAALGCLVKDYFPEPVTVSWNSGALTSGVHTFPAVLQSSGLYSLSSVVTVPSSSLGTQTYICNVNHKPSNTKVDKKVEPKSCDKTHTCPPCPAPELLGGPSVFLFPPKPKDTLMISRTPEVTCVVVDVSHEDPEVKFNWYVDGVEVHNAKTKPREEQYNSTYRVVSVLTVLHQDWLNGKEYKCKVSNKALPAPIEKTISKAKGQPREPQVYTLPPSREEMTKNQVSLTCLVKGFYPSDIAVEWESNGQPENNYKTTPPVLDSDGSFFLYSKLTVDKSRWQQGNVFSCSVMHEALHNHYTQKSLSLSPGGGGGSGGGGSQVQLQESGPGLVKPSETLSLTCTVSGGSVSSGDYYWTWIRQSPGKGLEWIGHIYYSGNTNYNPSLKSRLTISIDTSKTQFSLKLSSVTAADTAIYYCVRDRVTGAFDIWGQGTMVTVSSGGGGSGGGGSGGGGSGGGGSDIQMTQSPSSLSASVGDRVTITCQASQDISNYLNWYQQKPGKAPKLLIYDASNLETGVPSRFSGSGSGTDFTFTISSLQPEDIATYFCQHFDHLPLAFGGGTKVEIK

SEQ ID NO: 48 - protein, 711 aa, Artificial Sequence
  Description of Artificial Sequence: Synthetic polypeptide
QVQLQESGPGLVKPSETLSLTCTVSGGSVSSGDYYWTWIRQSPGKGLEWIGHIYYSGNTNYNPSLKSRLTISIDTSKTQFSLKLSSVTAADTAIYYCVRDRVTGAFDIWGQGTMVTVSSASTKGPSVFPLAPSSKSTSGGTAALGCLVKDYFPEPVTVSWNSGALTSGVHTFPAVLQSSGLYSLSSVVTVPSSSLGTQTYICNVNHKPSNTKVDKKVEPKSCDKTHTCPPCPAPELLGGPSVFLFPPKPKDTLMISRTPEVTCVVVDVSHEDPEVKFNWYVDGVEVHNAKTKPREEQYNSTYRVVSVLTVLHQDWLNGKEYKCKVSNKALPAPIEKTISKAKGQPREPQVYTLPPSREEMTKNQVSLTCLVKGFYPSDIAVEWESNGQPENNYKTTPPVLDSDGSFFLYSKLTVDKSRWQQGNVFSCSVMHEALHNHYTQKSLSLSPGGGGGSGGGGSQVQLVQSGAEVKKPGASVKVSCKASGYTFTGYYMHWVRQAPGQGLEWMGWINPDSGGTNYAQKFQGRVTMTRDTSISTAYMELNRLRSDDTAVYYCARDQPLGYCTNGVCSYFDYWGQGTLVTVSSGGGGSGGGGSGGGGSGGGGSDIQMTQSPSSVSASVGDRVTITCRASQGIYSWLAWYQQKPGKAPNLLIYTASTLQSGVPSRFSGSGSGTDFTLTISSLQPEDFATYYCQQANIFPLTFGGGTKVEIK

SEQ ID NO: 49 - protein, 477 aa, Artificial Sequence
  Description of Artificial Sequence: Synthetic polypeptide
DIQMTQSPSSLSASVGDRVTITCQASQDISNYLNWYQQKPGKAPKLLIYDASNLETGVPSRFSGSGSGTDFTFTISSLQPEDIATYFCQHFDHLPLAFGGGTKVEIKRTVAAPSVFIFPPSDEQLKSGTASVVCLLNNFYPREAKVQWKVDNALQSGNSQESVTEQDSKDSTYSLSSTLTLSKADYEKHKVYACEVTHQGLSSPVTKSFNRGECGGGGSGGGGSQVQLVQSGAEVKKPGASVKVSCKASGYTFTGYYMHWVRQAPGQGLEWMGWINPDSGGTNYAQKFQGRVTMTRDTSISTAYMELNRLRSDDTAVYYCARDQPLGYCTNGVCSYFDYWGQGTLVTVSSGGGGSGGGGSGGGGSGGGGSDIQMTQSPSSVSASVGDRVTITCRASQGIYSWLAWYQQKPGKAPNLLIYTASTLQSGVPSRFSGSGSGTDFTLTISSLQPEDFATYYCQQANIFPLTFGGGTKVEIK

SEQ ID NO: 50 - protein, 453 aa, Artificial Sequence
  Description of Artificial Sequence: Synthetic polypeptide
QVQLQQSGAEVKKPGSSVKVSCKASGYTFTNYYIYWVRQAPGQGLEWIGGINPTSGGSNFNEKFKTRVTITVDESTNTAYMELSSLRSEDTAFYFCARQGLWFDSDGRGFDFWGQGSTVTVSSASTKGPSVFPLAPSSKSTSGGTAALGCLVKDYFPEPVTVSWNSGALTSGVHTFPAVLQSSGLYSLSSVVTVPSSSLGTQTYICNVNHKPSNTKVDKKVEPKSCDKTHTCPPCPAPELLGGPSVFLFPPKPKDTLMISRTPEVTCVVVDVSHEDPEVKFNWYVDGVEVHNAKTKPREEQYNSTYRVVSVLTVLHQDWLNGKEYKCKVSNKALPAPIEKTISKAKGQPREPQVYTLPPSREEMTKNQVSLTCLVKGFYPSDIAVEWESNGQPENNYKTTPPVLDSDGSFFLYSKLTVDKSRWQQGNVFSCSVMHEALHNHYTQKSLSLSPGK

SEQ ID NO: 51 - protein, 123 aa, Artificial Sequence
  Description of Artificial Sequence: Synthetic polypeptide
QVQLQQSGAEVKKPGSSVKVSCKASGYTFTNYYIYWVRQAPGQGLEWIGGINPTSGGSNFNEKFKTRVTITVDESTNTAYMELSSLRSEDTAFYFCARQGLWFDSDGRGFDFWGQGSTVTVSS

SEQ ID NO: 52 - protein, 8 aa, Artificial Sequence
  Description of Artificial Sequence: Synthetic peptide
GYTFTNYY

SEQ ID NO: 53 - protein, 8 aa, Artificial Sequence
  Description of Artificial Sequence: Synthetic peptide
INPTSGGS

SEQ ID NO: 54 - protein, 16 aa, Artificial Sequence
  Description of Artificial Sequence: Synthetic peptide
ARQGLWFDSDGRGFDF

SEQ ID NO: 55 - protein, 219 aa, Artificial Sequence
  Description of Artificial Sequence: Synthetic polypeptide
DIQMTQSPSSLSASVGDRVTITCRSSQNIVHSNGNTYLDWYQQTPGKAPKLLIYKVSNRFSGVPSRFSGSGSGTDFTFTISSLQPEDIATYYCFQYSHVPWTFGQGTKLEIKRTVAAPSVFIFPPSDEQLKSGTASVVCLLNNFYPREAKVQWKVDNALQSGNSQESVTEQDSKDSTYSLSSTLTLSKADYEKHKVYACEVTHQGLSSPVTKSFNRGEC

SEQ ID NO: 56 - protein, 112 aa, Artificial Sequence
  Description of Artificial Sequence: Synthetic polypeptide
DIQMTQSPSSLSASVGDRVTITCRSSQNIVHSNGNTYLDWYQQTPGKAPKLLIYKVSNRFSGVPSRFSGSGSGTDFTFTISSLQPEDIATYYCFQYSHVPWTFGQGTKLEIK

SEQ ID NO: 57 - protein, 11 aa, Artificial Sequence
  Description of Artificial Sequence: Synthetic peptide
QNIVHSNGNTY

SEQ ID NO: 58 - protein, 3 aa, Artificial Sequence
  Description of Artificial Sequence: Synthetic peptide
KVS

SEQ ID NO: 59 - protein, 9 aa, Artificial Sequence
  Description of Artificial Sequence: Synthetic peptide
FQYSHVPWT

SEQ ID NO: 60 - protein, 720 aa, Artificial Sequence
  Description of Artificial Sequence: Synthetic polypeptide
QVQLVQSGAEVKKPGASVKVSCKASGYTFTGYYMHWVRQAPGQGLEWMGWINPDSGGTNYAQKFQGRVTMTRDTSISTAYMELNRLRSDDTAVYYCARDQPLGYCTNGVCSYFDYWGQGTLVTVSSASTKGPSVFPLAPSSKSTSGGTAALGCLVKDYFPEPVTVSWNSGALTSGVHTFPAVLQSSGLYSLSSVVTVPSSSLGTQTYICNVNHKPSNTKVDKKVEPKSCDKTHTCPPCPAPELLGGPSVFLFPPKPKDTLMISRTPEVTCVVVDVSHEDPEVKFNWYVDGVEVHNAKTKPREEQYNSTYRVVSVLTVLHQDWLNGKEYKCKVSNKALPAPIEKTISKAKGQPREPQVYTLPPSREEMTKNQVSLTCLVKGFYPSDIAVEWESNGQPENNYKTTPPVLDSDGSFFLYSKLTVDKSRWQQGNVFSCSVMHEALHNHYTQKSLSLSPGGGGGSGGGGSQVQLQQSGAEVKKPGSSVKVSCKASGYTFTNYYIYWVRQAPGQGLEWIGGINPTSGGSNFNEKFKTRVTITVDESTNTAYMELSSLRSEDTAFYFCARQGLWFDSDGRGFDFWGQGSTVTVSSGGGGSGGGGSGGGGSGGGGSDIQMTQSPSSLSASVGDRVTITCRSSQNIVHSNGNTYLDWYQQTPGKAPKLLIYKVSNRFSGVPSRFSGSGSGTDFTFTISSLQPEDIATYYCFQYSHVPWTFGQGTKLEIK

SEQ ID NO: 61 - protein, 715 aa, Artificial Sequence
  Description of Artificial Sequence: Synthetic polypeptide
QVQLQQSGAEVKKPGSSVKVSCKASGYTFTNYYIYWVRQAPGQGLEWIGGINPTSGGSNFNEKFKTRVTITVDESTNTAYMELSSLRSEDTAFYFCARQGLWFDSDGRGFDFWGQGSTVTVSSASTKGPSVFPLAPSSKSTSGGTAALGCLVKDYFPEPVTVSWNSGALTSGVHTFPAVLQSSGLYSLSSVVTVPSSSLGTQTYICNVNHKPSNTKVDKKVEPKSCDKTHTCPPCPAPELLGGPSVFLFPPKPKDTLMISRTPEVTCVVVDVSHEDPEVKFNWYVDGVEVHNAKTKPREEQYNSTYRVVSVLTVLHQDWLNGKEYKCKVSNKALPAPIEKTISKAKGQPREPQVYTLPPSREEMTKNQVSLTCLVKGFYPSDIAVEWESNGQPENNYKTTPPVLDSDGSFFLYSKLTVDKSRWQQGNVFSCSVMHEALHNHYTQKSLSLSPGGGGGSGGGGSQVQLVQSGAEVKKPGASVKVSCKASGYTFTGYYMHWVRQAPGQGLEWMGWINPDSGGTNYAQKFQGRVTMTRDTSISTAYMELNRLRSDDTAVYYCARDQPLGYCTNGVCSYFDYWGQGTLVTVSSGGGGSGGGGSGGGGSGGGGSDIQMTQSPSSVSASVGDRVTITCRASQGIYSWLAWYQQKPGKAPNLLIYTASTLQSGVPSRFSGSGSGTDFTLTISSLQPEDFATYYCQQANIFPLTFGGGTKVEIK

SEQ ID NO: 62 - protein, 482 aa, Artificial Sequence
  Description of Artificial Sequence: Synthetic polypeptide
DIQMTQSPSSLSASVGDRVTITCRSSQNIVHSNGNTYLDWYQQTPGKAPKLLIYKVSNRFSGVPSRFSGSGSGTDFTFTISSLQPEDIATYYCFQYSHVPWTFGQGTKLEIKRTVAAPSVFIFPPSDEQLKSGTASVVCLLNNFYPREAKVQWKVDNALQSGNSQESVTEQDSKDSTYSLSSTLTLSKADYEKHKVYACEVTHQGLSSPVTKSFNRGECGGGGSGGGGSQVQLVQSGAEVKKPGASVKVSCKASGYTFTGYYMHWVRQAPGQGLEWMGWINPDSGGTNYAQKFQGRVTMTRDTSISTAYMELNRLRSDDTAVYYCARDQPLGYCTNGVCSYFDYWGQGTLVTVSSGGGGSGGGGSGGGGSGGGGSDIQMTQSPSSVSASVGDRVTITCRASQGIYSWLAWYQQKPGKAPNLLIYTASTLQSGVPSRFSGSGSGTDFTLTISSLQPEDFATYYCQQANIFPLTFGGGTKVEIK

SEQ ID NO: 63 - protein, 455 aa, Artificial Sequence
  Description of Artificial Sequence: Synthetic polypeptide
QVQLVESGGGVVQPGRSLRLSCAASGFTFSTYGMHWVRQAPGKGLEWVAVIWDDGSYKYYGDSVKGRFTISRDNSKNTLYLQMNSLRAEDTAVYYCARDGITMVRGVMKDYFDYWGQGTLVTVSSASTKGPSVFPLAPSSKSTSGGTAALGCLVKDYFPEPVTVSWNSGALTSGVHTFPAVLQSSGLYSLSSVVTVPSSSLGTQTYICNVNHKPSNTKVDKKVEPKSCDKTHTCPPCPAPELLGGPSVFLFPPKPKDTLMISRTPEVTCVVVDVSHEDPEVKFNWYVDGVEVHNAKTKPREEQYNSTYRVVSVLTVLHQDWLNGKEYKCKVSNKALPAPIEKTISKAKGQPREPQVYTLPPSREEMTKNQVSLTCLVKGFYPSDIAVEWESNGQPENNYKTTPPVLDSDGSFFLYSKLTVDKSRWQQGNVFSCSVMHEALHNHYTQKSLSLSPGK

SEQ ID NO: 64 - protein, 125 aa, Artificial Sequence [sequence omitted]

SEQ ID NO: 65 - protein, 8 aa, Artificial Sequence
  Description of Artificial Sequence: Synthetic peptide
GFTFSTYG

SEQ ID NO: 66 - protein, 8 aa, Artificial Sequence
  Description of Artificial Sequence: Synthetic peptide
IWDDGSYK

SEQ ID NO: 67 - protein, 18 aa, Artificial Sequence
  Description of Artificial Sequence: Synthetic peptide
ARDGITMVRGVMKDYFDY

SEQ ID NO: 68 - protein, 214 aa, Artificial Sequence
  Description of Artificial Sequence: Synthetic polypeptide
AIQLTQSPSSLSASVGDRVTITCRASQDISSALVWYQQKPGKAPKLLIYDASSLESGVPSRFSGSESGTDFTLTISSLQPEDFATYYCQQFNSYPLTFGGGTKVEIKRTVAAPSVFIFPPSDEQLKSGTASVVCLLNNFYPREAKVQWKVDNALQSGNSQESVTEQDSKDSTYSLSSTLTLSKADYEKHKVYACEVTHQGLSSPVTKSFNRGEC

SEQ ID NO: 69 - protein, 107 aa, Artificial Sequence [sequence omitted]

SEQ ID NO: 70 - protein, 6 aa, Artificial Sequence
  Description of Artificial Sequence: Synthetic peptide
QDISSA

SEQ ID NO: 71 - protein, 3 aa, Artificial Sequence
  Description of Artificial Sequence: Synthetic peptide
DAS

SEQ ID NO: 72 - protein, 9 aa, Artificial Sequence
  Description of Artificial Sequence: Synthetic peptide
QQFNSYPLT

SEQ ID NO: 73 - protein, 717 aa, Artificial Sequence
  Description of Artificial Sequence: Synthetic polypeptide
QVQLVQSGAEVKKPGASVKVSCKASGYTFTGYYMHWVRQAPGQGLEWMGWINPDSGGTNYAQKFQGRVTMTRDTSISTAYMELNRLRSDDTAVYYCARDQPLGYCTNGVCSYFDYWGQGTLVTVSSASTKGPSVFPLAPSSKSTSGGTAALGCLVKDYFPEPVTVSWNSGALTSGVHTFPAVLQSSGLYSLSSVVTVPSSSLGTQTYICNVNHKPSNTKVDKKVEPKSCDKTHTCPPCPAPELLGGPSVFLFPPKPKDTLMISRTPEVTCVVVDVSHEDPEVKFNWYVDGVEVHNAKTKPREEQYNSTYRVVSVLTVLHQDWLNGKEYKCKVSNKALPAPIEKTISKAKGQPREPQVYTLPPSREEMTKNQVSLTCLVKGFYPSDIAVEWESNGQPENNYKTTPPVLDSDGSFFLYSKLTVDKSRWQQGNVFSCSVMHEALHNHYTQKSLSLSPGGGGGSGGGGSQVQLVESGGGVVQPGRSLRLSCAASGFTFSTYGMHWVRQAPGKGLEWVAVIWDDGSYKYYGDSVKGRFTISRDNSKNTLYLQMNSLRAEDTAVYYCARDGITMVRGVMKDYFDYWGQGTLVTVSSGGGGSGGGGSGGGGSGGGGSAIQLTQSPSSLSASVGDRVTITCRASQDISSALVWYQQKPGKAPKLLIYDASSLESGVPSRFSGSESGTDFTLTISSLQPEDFATYYCQQFNSYPLTFGGGTKVEIK

SEQ ID NO: 74 - protein, 717 aa, Artificial Sequence
  Description of Artificial Sequence: Synthetic polypeptide
QVQLVESGGGVVQPGRSLRLSCAASGFTFSTYGMHWVRQAPGKGLEWVAVIWDDGSYKYYGDSVKGRFTISRDNSKNTLYLQMNSLRAEDTAVYYCARDGITMVRGVMKDYFDYWGQGTLVTVSSASTKGPSVFPLAPSSKSTSGGTAALGCLVKDYFPEPVTVSWNSGALTSGVHTFPAVLQSSGLYSLSSVVTVPSSSLGTQTYICNVNHKPSNTKVDKKVEPKSCDKTHTCPPCPAPELLGGPSVFLFPPKPKDTLMISRTPEVTCVVVDVSHEDPEVKFNWYVDGVEVHNAKTKPREEQYNSTYRVVSVLTVLHQDWLNGKEYKCKVSNKALPAPIEKTISKAKGQPREPQVYTLPPSREEMTKNQVSLTCLVKGFYPSDIAVEWESNGQPENNYKTTPPVLDSDGSFFLYSKLTVDKSRWQQGNVFSCSVMHEALHNHYTQKSLSLSPGGGGGSGGGGSQVQLVQSGAEVKKPGASVKVSCKASGYTFTGYYMHWVRQAPGQGLEWMGWINPDSGGTNYAQKFQGRVTMTRDTSISTAYMELNRLRSDDTAVYYCARDQPLGYCTNGVCSYFDYWGQGTLVTVSSGGGGSGGGGSGGGGSGGGGSDIQMTQSPSSVSASVGDRVTITCRASQGIYSWLAWYQQKPGKAPNLLIYTASTLQSGVPSRFSGSGSGTDFTLTISSLQPEDFATYYCQQANIFPLTFGGGTKVEIK

SEQ ID NO: 75 - protein, 477 aa, Artificial Sequence
  Description of Artificial Sequence: Synthetic polypeptide
AIQLTQSPSSLSASVGDRVTITCRASQDISSALVWYQQKPGKAPKLLIYDASSLESGVPSRFSGSESGTDFTLTISSLQPEDFATYYCQQFNSYPLTFGGGTKVEIKRTVAAPSVFIFPPSDEQLKSGTASVVCLLNNFYPREAKVQWKVDNALQSGNSQESVTEQDSKDSTYSLSSTLTLSKADYEKHKVYACEVTHQGLSSPVTKSFNRGECGGGGSGGGGSQVQLVQSGAEVKKPGASVKVSCKASGYTFTGYYMHWVRQAPGQGLEWMGWINPDSGGTNYAQKFQGRVTMTRDTSISTAYMELNRLRSDDTAVYYCARDQPLGYCTNGVCSYFDYWGQGTLVTVSSGGGGSGGGGSGGGGSGGGGSDIQMTQSPSSVSASVGDRVTITCRASQGIYSWLAWYQQKPGKAPNLLIYTASTLQSGVPSRFSGSGSGTDFTLTISSLQPEDFATYYCQQANIFPLTFGGGTKVEIK

SEQ ID NO: 76 - protein, 449 aa, Artificial Sequence
  Description of Artificial Sequence: Synthetic polypeptide
EVQLVESGGGLVQPGGSLRLSCAASGYTFTSYWLHWVRQAPGKGLEWVGMIDPSNSDTRFNPNFKDRFTISADTSKNTAYLQMNSLRAEDTAVYYCATYRSYVTPLDYWGQGTLVTVSSASTKGPSVFPLAPSSKSTSGGTAALGCLVKDYFPEPVTVSWNSGALTSGVHTFPAVLQSSGLYSLSSVVTVPSSSLGTQTYICNVNHKPSNTKVDKKVEPKSCDKTHTCPPCPAPELLGGPSVFLFPPKPKDTLMISRTPEVTCVVVDVSHEDPEVKFNWYVDGVEVHNAKTKPREEQYNSTYRVVSVLTVLHQDWLNGKEYKCKVSNKALPAPIEKTISKAKGQPREPQVYTLPPSREEMTKNQVSLTCLVKGFYPSDIAVEWESNGQPENNYKTTPPVLDSDGSFFLYSKLTVDKSRWQQGNVFSCSVMHEALHNHYTQKSLSLSPGK

SEQ ID NO: 77 - protein, 119 aa, Artificial Sequence [sequence omitted]

SEQ ID NO: 78 - protein, 8 aa, Artificial Sequence
  Description of Artificial Sequence: Synthetic peptide
GYTFTSYW

SEQ ID NO: 79 - protein, 8 aa, Artificial Sequence
  Description of Artificial Sequence: Synthetic peptide
IDPSNSDT

SEQ ID NO: 80 - protein, 12 aa, Artificial Sequence
  Description of Artificial Sequence: Synthetic peptide
ATYRSYVTPLDY

SEQ ID NO: 81 - protein, 220 aa, Artificial Sequence
  Description of Artificial Sequence: Synthetic polypeptide
DIQMTQSPSSLSASVGDRVTITCKSSQSLLYTSSQKNYLAWYQQKPGKAPKLLIYWASTRESGVPSRFSGSGSGTDFTLTISSLQPEDFATYYCQQYYAYPWTFGQGTKVEIKRTVAAPSVFIFPPSDEQLKSGTASVVCLLNNFYPREAKVQWKVDNALQSGNSQESVTEQDSKDSTYSLSSTLTLSKADYEKHKVYACEVTHQGLSSPVTKSFNRGEC

SEQ ID NO: 82 - protein, 113 aa, Artificial Sequence [sequence omitted]

SEQ ID NO: 83 - protein, 12 aa, Artificial Sequence
  Description of Artificial Sequence: Synthetic peptide
QSLLYTSSQKNY

SEQ ID NO: 84 - protein, 3 aa, Artificial Sequence
  Description of Artificial Sequence: Synthetic peptide
WAS

SEQ ID NO: 85 - protein, 9 aa, Artificial Sequence
  Description of Artificial Sequence: Synthetic peptide
QQYYAYPWT

SEQ ID NO: 86 - protein, 717 aa, Artificial Sequence
  Description of Artificial Sequence: Synthetic polypeptide
QVQLVQSGAEVKKPGASVKVSCKASGYTFTGYYMHWVRQAPGQGLEWMGWINPDSGGTNYAQKFQGRVTMTRDTSISTAYMELNRLRSDDTAVYYCARDQPLGYCTNGVCSYFDYWGQGTLVTVSSASTKGPSVFPLAPSSKSTSGGTAALGCLVKDYFPEPVTVSWNSGALTSGVHTFPAVLQSSGLYSLSSVVTVPSSSLGTQTYICNVNHKPSNTKVDKKVEPKSCDKTHTCPPCPAPELLGGPSVFLFPPKPKDTLMISRTPEVTCVVVDVSHEDPEVKFNWYVDGVEVHNAKTKPREEQYNSTYRVVSVLTVLHQDWLNGKEYKCKVSNKALPAPIEKTISKAKGQPREPQVYTLPPSREEMTKNQVSLTCLVKGFYPSDIAVEWESNGQPENNYKTTPPVLDSDGSFFLYSKLTVDKSRWQQGNVFSCSVMHEALHNHYTQKSLSLSPGGGGGSGGGGSEVQLVESGGGLVQPGGSLRLSCAASGYTFTSYWLHWVRQAPGKGLEWVGMIDPSNSDTRFNPNFKDRFTISADTSKNTAYLQMNSLRAEDTAVYYCATYRSYVTPLDYWGQGTLVTVSSGGGGSGGGGSGGGGSGGGGSDIQMTQSPSSLSASVGDRVTITCKSSQSLLYTSSQKNYLAWYQQKPGKAPKLLIYWASTRESGVPSRFSGSGSGTDFTLTISSLQPEDFATYYCQQYYAYPWTFGQGTKVEIK

SEQ ID NO: 87 - protein, 711 aa, Artificial Sequence
  Description of Artificial Sequence: Synthetic polypeptide
EVQLVESGGGLVQPGGSLRLSCAASGYTFTSYWLHWVRQAPGKGLEWVGMIDPSNSDTRFNPNFKDRFTISADTSKNTAYLQMNSLRAEDTAVYYCATYRSYVTPLDYWGQGTLVTVSSASTKGPSVFPLAPSSKSTSGGTAALGCLVKDYFPEPVTVSWNSGALTSGVHTFPAVLQSSGLYSLSSVVTVPSSSLGTQTYICNVNHKPSNTKVDKKVEPKSCDKTHTCPPCPAPELLGGPSVFLFPPKPKDTLMISRTPEVTCVVVDVSHEDPEVKFNWYVDGVEVHNAKTKPREEQYNSTYRVVSVLTVLHQDWLNGKEYKCKVSNKALPAPIEKTISKAKGQPREPQVYTLPPSREEMTKNQVSLTCLVKGFYPSDIAVEWESNGQPENNYKTTPPVLDSDGSFFLYSKLTVDKSRWQQGNVFSCSVMHEALHNHYTQKSLSLSPGGGGGSGGGGSQVQLVQSGAEVKKPGASVKVSCKASGYTFTGYYMHWVRQAPGQGLEWMGWINPDSGGTNYAQKFQGRVTMTRDTSISTAYMELNRLRSDDTAVYYCARDQPLGYCTNGVCSYFDYWGQGTLVTVSSGGGGSGGGGSGGGGSGGGGSDIQMTQSPSSVSASVGDRVTITCRASQGIYSWLAWYQQKPGKAPNLLIYTASTLQSGVPSRFSGSGSGTDFTLTISSLQPEDFATYYCQQANIFPLTFGGGTKVEIK

SEQ ID NO: 88 - protein, 483 aa, Artificial Sequence
  Description of Artificial Sequence: Synthetic polypeptide
DIQMTQSPSSLSASVGDRVTITCKSSQSLLYTSSQKNYLAWYQQKPGKAPKLLIYWASTRESGVPSRFSGSGSGTDFTLTISSLQPEDFATYYCQQYYAYPWTFGQGTKVEIKRTVAAPSVFIFPPSDEQLKSGTASVVCLLNNFYPREAKVQWKVDNALQSGNSQESVTEQDSKDSTYSLSSTLTLSKADYEKHKVYACEVTHQGLSSPVTKSFNRGECGGGGSGGGGSQVQLVQSGAEVKKPGASVKVSCKASGYTFTGYYMHWVRQAPGQGLEWMGWINPDSGGTNYAQKFQGRVTMTRDTSISTAYMELNRLRSDDTAVYYCARDQPLGYCTNGVCSYFDYWGQGTLVTVSSGGGGSGGGGSGGGGSGGGGSDIQMTQSPSSVSASVGDRVTITCRASQGIYSWLAWYQQKPGKAPNLLIYTASTLQSGVPSRFSGSGSGTDFTLTISSLQPEDFATYYCQQANIFPLTFGGGTKVEIK

SEQ ID NO: 89 - protein, 447 aa, Artificial Sequence
  Description of Artificial Sequence: Synthetic polypeptide
QVQLQQWGAGLLKPSETLSLTCAVYGGSFSGYYWSWIRQPPGKGLEWIGEINHSGSTNYNPSLKSRVTISVETSKNQFSLKLSSVTAADTAVYYCARDKWTWYFDLWGRGTLVTVSSASTKGPSVFPLAPSSKSTSGGTAALGCLVKDYFPEPVTVSWNSGALTSGVHTFPAVLQSSGLYSLSSVVTVPSSSLGTQTYICNVNHKPSNTKVDKKVEPKSCDKTHTCPPCPAPELLGGPSVFLFPPKPKDTLMISRTPEVTCVVVDVSHEDPEVKFNWYVDGVEVHNAKTKPREEQYNSTYRVVSVLTVLHQDWLNGKEYKCKVSNKALPAPIEKTISKAKGQPREPQVYTLPPSREEMTKNQVSLTCLVKGFYPSDIAVEWESNGQPENNYKTTPPVLDSDGSFFLYSKLTVDKSRWQQGNVFSCSVMHEALHNHYTQKSLSLSPGK

SEQ ID NO: 90 - protein, 117 aa, Artificial Sequence [sequence omitted]

SEQ ID NO: 91 - protein, 8 aa, Artificial Sequence
  Description of Artificial Sequence: Synthetic peptide
GGSFSGYY

SEQ ID NO: 92 - protein, 7 aa, Artificial Sequence
  Description of Artificial Sequence: Synthetic peptide
INHSGST

SEQ ID NO: 93 - protein, 11 aa, Artificial Sequence
  Description of Artificial Sequence: Synthetic peptide
ARDKWTWYFDL

SEQ ID NO: 94 - protein, 220 aa, Artificial Sequence
  Description of Artificial Sequence: Synthetic polypeptide
DIEMTQSPDSLAVSLGERATINCRSSQSVLYSSSNRNYLAWYQQNPGQPPKLLIYWASTRESGVPDRFSGSGSGTDFTLTISSLQAEDVAVYYCQQYYSTPRTFGQGTKVEIKRTVAAPSVFIFPPSDEQLKSGTASVVCLLNNFYPREAKVQWKVDNALQSGNSQESVTEQDSKDSTYSLSSTLTLSKADYEKHKVYACEVTHQGLSSPVTKSFNRGEC

SEQ ID NO: 95 - protein, 113 aa, Artificial Sequence [sequence omitted]

SEQ ID NO: 96 - protein, 12 aa, Artificial Sequence
  Description of Artificial Sequence: Synthetic peptide
QSVLYSSSNRNY

SEQ ID NO: 97 - protein, 3 aa, Artificial Sequence
  Description of Artificial Sequence: Synthetic peptide
WAS

SEQ ID NO: 98 - protein, 9 aa, Artificial Sequence
  Description of Artificial Sequence: Synthetic peptide
QQYYSTPRT

SEQ ID NO: 99 - protein, 715 aa, Artificial Sequence
  Description of Artificial Sequence: Synthetic polypeptide
QVQLVQSGAEVKKPGASVKVSCKASGYTFTGYYMHWVRQAPGQGLEWMGWINPDSGGTNYAQKFQGRVTMTRDTSISTAYMELNRLRSDDTAVYYCARDQPLGYCTNGVCSYFDYWGQGTLVTVSSASTKGPSVFPLAPSSKSTSGGTAALGCLVKDYFPEPVTVSWNSGALTSGVHTFPAVLQSSGLYSLSSVVTVPSSSLGTQTYICNVNHKPSNTKVDKKVEPKSCDKTHTCPPCPAPELLGGPSVFLFPPKPKDTLMISRTPEVTCVVVDVSHEDPEVKFNWYVDGVEVHNAKTKPREEQYNSTYRVVSVLTVLHQDWLNGKEYKCKVSNKALPAPIEKTISKAKGQPREPQVYTLPPSREEMTKNQVSLTCLVKGFYPSDIAVEWESNGQPENNYKTTPPVLDSDGSFFLYSKLTVDKSRWQQGNVFSCSVMHEALHNHYTQKSLSLSPGGGGGSGGGGSQVQLQQWGAGLLKPSETLSLTCAVYGGSFSGYYWSWIRQPPGKGLEWIGEINHSGSTNYNPSLKSRVTISVETSKNQFSLKLSSVTAADTAVYYCARDKWTWYFDLWGRGTLVTVSSGGGGSGGGGSGGGGSGGGGSDIEMTQSPDSLAVSLGERATINCRSSQSVLYSSSNRNYLAWYQQNPGQPPKLLIYWASTRESGVPDRFSGSGSGTDFTLTISSLQAEDVAVYYCQQYYSTPRTFGQGTKVEIK

SEQ ID NO: 100 - protein, 709 aa, Artificial Sequence
  Description of Artificial Sequence: Synthetic polypeptide
QVQLQQWGAGLLKPSETLSLTCAVYGGSFSGYYWSWIRQPPGKGLEWIGEINHSGSTNYNPSLKSRVTISVETSKNQFSLKLSSVTAADTAVYYCARDKWTWYFDLWGRGTLVTVSSASTKGPSVFPLAPSSKSTSGGTAALGCLVKDYFPEPVTVSWNSGALTSGVHTFPAVLQSSGLYSLSSVVTVPSSSLGTQTYICNVNHKPSNTKVDKKVEPKSCDKTHTCPPCPAPELLGGPSVFLFPPKPKDTLMISRTPEVTCVVVDVSHEDPEVKFNWYVDGVEVHNAKTKPREEQYNSTYRVVSVLTVLHQDWLNGKEYKCKVSNKALPAPIEKTISKAKGQPREPQVYTLPPSREEMTKNQVSLTCLVKGFYPSDIAVEWESNGQPENNYKTTPPVLDSDGSFFLYSKLTVDKSRWQQGNVFSCSVMHEALHNHYTQKSLSLSPGGGGGSGGGGSQVQLVQSGAEVKKPGASVKVSCKASGYTFTGYYMHWVRQAPGQGLEWMGWINPDSGGTNYAQKFQGRVTMTRDTSISTAYMELNRLRSDDTAVYYCARDQPLGYCTNGVCSYFDYWGQGTLVTVSSGGGGSGGGGSGGGGSGGGGSDIQMTQSPSSVSASVGDRVTITCRASQGIYSWLAWYQQKPGKAPNLLIYTASTLQSGVPSRFSGSGSGTDFTLTISSLQPEDFATYYCQQANIFPLTFGGGTKVEIK

SEQ ID NO: 101 - protein, 483 aa, Artificial Sequence
  Description of Artificial Sequence: Synthetic polypeptide
DIEMTQSPDSLAVSLGERATINCRSSQSVLYSSSNRNYLAWYQQNPGQPPKLLIYWASTRESGVPDRFSGSGSGTDFTLTISSLQAEDVAVYYCQQYYSTPRTFGQGTKVEIKRTVAAPSVFIFPPSDEQLKSGTASVVCLLNNFYPREAKVQWKVDNALQSGNSQESVTEQDSKDSTYSLSSTLTLSKADYEKHKVYACEVTHQGLSSPVTKSFNRGECGGGGSGGGGSQVQLVQSGAEVKKPGASVKVSCKASGYTFTGYYMHWVRQAPGQGLEWMGWINPDSGGTNYAQKFQGRVTMTRDTSISTAYMELNRLRSDDTAVYYCARDQPLGYCTNGVCSYFDYWGQGTLVTVSSGGGGSGGGGSGGGGSGGGGSDIQMTQSPSSVSASVGDRVTITCRASQGIYSWLAWYQQKPGKAPNLLIYTASTLQSGVPSRFSGSGSGTDFTLTISSLQPEDFATYYCQQANIFPLTFGGGTKVEIK

SEQ ID NO: 102 - protein, 449 aa, Artificial Sequence
  Description of Artificial Sequence: Synthetic polypeptide
QVQLQQSGAEVKKPGASVKVSCEASGYTFPSYVLHWVKQAPGQGLEWIGYINPYNDGTQYNEKFKGKATLTRDTSINTAYMELSRLRSDDTAVYYCARGFGGSYGFAYWGQGTLVTVSSASTKGPSVFPLAPSSKSTSGGTAALGCLVKDYFPEPVTVSWNSGALTSGVHTFPAVLQSSGLYSLSSVVTVPSSSLGTQTYICNVNHKPSNTKVDKKVEPKSCDKTHTCPPCPAPELLGGPSVFLFPPKPKDTLMISRTPEVTCVVVDVSHEDPEVKFNWYVDGVEVHNAKTKPREEQYNSTYRVVSVLTVLHQDWLNGKEYKCKVSNKALPAPIEKTISKAKGQPREPQVYTLPPSREEMTKNQVSLTCLVKGFYPSDIAVEWESNGQPENNYKTTPPVLDSDGSFFLYSKLTVDKSRWQQGNVFSCSVMHEALHNHYTQKSLSLSPGK

SEQ ID NO: 103 - protein, 119 aa, Artificial Sequence
  Description of Artificial Sequence: Synthetic polypeptide
QVQLQQSGAEVKKFGASVKVSCEASGYTFPSYVLHWVKQAPGQGLEWIGYINPYNDGTQTNKKFKGKATLTRDTSINTAYMELSRLRSDDTAVYYCARGFGGSYGFAYNGQGTLVTVSS

SEQ ID NO: 104 - protein, 8 aa, Artificial Sequence
  Description of Artificial Sequence: Synthetic peptide
GYTFPSYV

SEQ ID NO: 105 - protein, 8 aa, Artificial Sequence
  Description of Artificial Sequence: Synthetic peptide
INPYNDGT

SEQ ID NO: 106 - protein, 12 aa, Artificial Sequence
  Description of Artificial Sequence: Synthetic peptide
ARGFGGSYGFAY

SEQ ID NO: 107 - protein, 215 aa, Artificial Sequence
  Description of Artificial Sequence: Synthetic polypeptide
DIQLTQSPSSLSASVGDRVTMTCSASSSVSSSYLYWYQQKPGKAPKLWIYSTSNLASGVPARFSGSGSGTDFTLTISSLQPEDSASYFCHQWNRYPYTFGGGTRLEIKRTVAAPSVFIFPPSDEQLKSGTASVVCLLNNFYPREAKVQWKVDNALQSGNSQESVTEQDSKDSTYSLSSTLTLSKADYEKHKVYACEVTHQGLSSPVTKSFNRGEC

SEQ ID NO: 108 - protein, 108 aa, Artificial Sequence
  Description of Artificial Sequence: Synthetic polypeptide
DIQLTQSPSSLSASVGDRVTMTCSASSSVSSSYLYWYQQKPGKAPKLWIYSTSNLASGVPARFSGSGSGTDFTLTISSLQPEDSASYFCHQWNRYPYTFGGGTRLEIK

SEQ ID NO: 109 - protein, 7 aa, Artificial Sequence
  Description of Artificial Sequence: Synthetic peptide
SSVSSSY

SEQ ID NO: 110 - protein, 3 aa, Artificial Sequence
  Description of Artificial Sequence: Synthetic peptide
STS

SEQ ID NO: 111 - protein, 9 aa, Artificial Sequence
  Description of Artificial Sequence: Synthetic peptide
HQWNRYPYT

SEQ ID NO: 112 - protein, 712 aa, Artificial Sequence
  Description of Artificial Sequence: Synthetic polypeptide
QVQLVQSGAEVKKPGASVKVSCKASGYTFTGYYMHWVRQAPGQGLEWMGWINPDSGGTNYAQKFQGRVTMTRDTSISTAYMELNRLRSDDTAVYYCARDQPLGYCTNGVCSYFDYWGQGTLVTVSSASTKGPSVFPLAPSSKSTSGGTAALGCLVKDYFPEPVTVSWNSGALTSGVHTFPAVLQSSGLYSLSSVVTVPSSSLGTQTYICNVNHKPSNTKVDKKVEPKSCDKTHTCPPCPAPELLGGPSVFLFPPKPKDTLMISRTPEVTCVVVDVSHEDPEVKFNWYVDGVEVHNAKTKPREEQYNSTYRVVSVLTVLHQDWLNGKEYKCKVSNKALPAPIEKTISKAKGQPREPQVYTLPPSREEMTKNQVSLTCLVKGFYPSDIAVEWESNGQPENNYKTTPPVLDSDGSFFLYSKLTVDKSRWQQGNVFSCSVMHEALHNHYTQKSLSLSPGGGGGSGGGGSQVQLQQSGAEVKKPGASVKVSCEASGYTFPSYVLHWVKQAPGQGLEWIGYINPYNDGTQYNEKFKGKATLTRDTSINTAYMELSRLRSDDTAVYYCARGFGGSYGFAYWGQGTLVTVSSGGGGSGGGGSGGGGSGGGGSDIQLTQSPSSLSASVGDRVTMTCSASSSVSSSYLYWYQQKPGKAPKLWIYSTSNLASGVPARFSGSGSGTDFTLTISSLQPEDSASYFCHQWNRYPYTFGGGTRLEIK

SEQ ID NO: 113 - protein, 711 aa, Artificial Sequence
  Description of Artificial Sequence: Synthetic polypeptide
QVQLQQSGAEVKKPGASVKVSCEASGYTFPSYVLHWVKQAPGQGLEWIGYINPYNDGTQYNEKFKGKATLTRDTSINTAYMELSRLRSDDTAVYYCARGFGGSYGFAYWGQGTLVTVSSASTKGPSVFPLAPSSKSTSGGTAALGCLVKDYFPEPVTVSWNSGALTSGVHTFPAVLQSSGLYSLSSVVTVPSSSLGTQTYICNVNHKPSNTKVDKKVEPKSCDKTHTCPPCPAPELLGGPSVFLFPPKPKDTLMISRTPEVTCVVVDVSHEDPEVKFNWYVDGVEVHNAKTKPREEQYNSTYRVVSVLTVLHQDWLNGKEYKCKVSNKALPAPIEKTISKAKGQPREPQVYTLPPSREEMTKNQVSLTCLVKGFYPSDIAVEWESNGQPENNYKTTPPVLDSDGSFFLYSKLTVDKSRWQQGNVFSCSVMHEALHNHYTQKSLSLSPGGGGGSGGGGSQVQLVQSGAEVKKPGASVKVSCKASGYTFTGYYMHWVRQAPGQGLEWMGWINPDSGGTNYAQKFQGRVTMTRDTSISTAYMELNRLRSDDTAVYYCARDQPLGYCTNGVCSYFDYWGQGTLVTVSSGGGGSGGGGSGGGGSGGGGSDIQMTQSPSSVSASVGDRVTITCRASQGIYSWLAWYQQKPGKAPNLLIYTASTLQSGVPSRFSGSGSGTDFTLTISSLQPEDFATYYCQQANIFPLTFGGGTKVEIK

SEQ ID NO: 114 - protein, 478 aa, Artificial Sequence
  Description of Artificial Sequence: Synthetic polypeptide
DIQLTQSPSSLSASVGDRVTMTCSASSSVSSSYLYWYQQKPGKAPKLWIYSTSNLASGVPARFSGSGSGTDFTLTISSLQPEDSASYFCHQWNRYPYTFGGGTRLEIKRTVAAPSVFIFPPSDEQLKSGTASVVCLLNNFYPREAKVQWKVDNALQSGNSQESVTEQDSKDSTYSLSSTLTLSKADYEKHKVYACEVTHQGLSSPVTKSFNRGECGGGGSGGGGSQVQLVQSGAEVKKPGASVKVSCKASGYTFTGYYMHWVRQAPGQGLEWMGWINPDSGGTNYAQKFQGRVTMTRDTSISTAYMELNRLRSDDTAVYYCARDQPLGYCTNGVCSYFDYWGQGTLVTVSSGGGGSGGGGSGGGGSGGGGSDIQMTQSPSSVSASVGDRVTITCRASQGIYSWLAWYQQKPGKAPNLLIYTASTLQSGVPSRFSGSGSGTDFTLTISSLQPEDFATYYCQQANIFPLTFGGGTKVEIK

SEQ ID NO: 115 - protein, 446 aa, Artificial Sequence
  Description of Artificial Sequence: Synthetic polypeptide
EVQLVESGGGLVQPGGSLRLSCAASGYSITNDYAWNWVRQAPGKGLEWVGYISYSGYTTYNPSLKSRFTISRDTSKNTLYLQMNSLRAEDTAVYYCARWTSGLDYWGQGTLVTVSSASTKGPSVFPLAPSSKSTSGGTAALGCLVKDYFPEPVTVSWNSGALTSGVHTFPAVLQSSGLYSLSSVVTVPSSSLGTQTYICNVNHKPSNTKVDKKVEPKSCDKTHTCPPCPAPELLGGPSVFLFPPKPKDTLMISRTPEVTCVVVDVSHEDPEVKFNWYVDGVEVHNAKTKPREEQYNSTYRVVSVLTVLHQDWLNGKEYKCKVSNKALPAPIEKTISKAKGQPREPQVYTLPPSREEMTKNQVSLTCLVKGFYPSDIAVEWESNGQPENNYKTTPPVLDSDGSFFLYSKLTVDKSRWQQGNVFSCSVMHEALHNHYTQKSLSLSPGK

SEQ ID NO: 116 - protein, 116 aa, Artificial Sequence
  Description of Artificial Sequence: Synthetic polypeptide
EVQLVESGGGLVQPGGSLRLSCAASGYSITNDYAWNWVRQAPGKGLEWVGYISYSGYTTYNPSLKSRFTISRDTSKNTLYLQMNSLRAEDTAVYYCARWTSGLDYWGQGTLVTVSS

SEQ ID NO: 117 - protein, 9 aa, Artificial Sequence
  Description of Artificial Sequence: Synthetic peptide
GYSITNDYA

SEQ ID NO: 118 - protein, 7 aa, Artificial Sequence
  Description of Artificial Sequence: Synthetic peptide
ISYSGYT

SEQ ID NO: 119 - protein, 9 aa, Artificial Sequence
  Description of Artificial Sequence: Synthetic peptide
ARWTSGLDY

SEQ ID NO: 120 - protein, 214 aa, Artificial Sequence
  Description of Artificial Sequence: Synthetic polypeptide
DIQMTQSPSSLSASVGDRVTITCKASDLIHNWLAWYQQKPGKAPKLLIYGATSLETGVPSRFSGSGSGTDFTLTISSLQPEDFATYYCQQYWTTPFTFGQGTKVEIKRTVAAPSVFIFPPSDEQLKSGTASVVCLLNNFYPREAKVQWKVDNALQSGNSQESVTEQDSKDSTYSLSSTLTLSKADYEKHKVYACEVTHQGLSSPVTKSFNRGEC

SEQ ID NO: 121 - protein, 107 aa, Artificial Sequence
  Description of Artificial Sequence: Synthetic polypeptide
DIQMTQSPSSLSASVGDRVTITCKASDLIHNWLAWYQQKPGKAPKLLIYGATSLETGVPSRFSGSGSGTDFTLTISSLQPEDFATYYCQQYWTTPFTFGQGTKVEIK

SEQ ID NO: 122 - protein, 6 aa, Artificial Sequence
  Description of Artificial Sequence: Synthetic peptide
DLIHNW

SEQ ID NO: 123 - protein, 3 aa, Artificial Sequence
  Description of Artificial Sequence: Synthetic peptide
GAT

SEQ ID NO: 124 - protein, 9 aa, Artificial Sequence
  Description of Artificial Sequence: Synthetic peptide
QQYWTTPFT

SEQ ID NO: 125 - protein, 708 aa, Artificial Sequence
  Description of Artificial Sequence: Synthetic polypeptide
QVQLVQSGAEVKKPGASVKVSCKASGYTFTGYYMHWVRQAPGQGLEWMGWINPDSGGTNYAQKFQGRVTMTRDTSISTAYMELNRLRSDDTAVYYCARDQPLGYCTNGVCSYFDYWGQGTLVTVSSASTKGPSVFPLAPSSKSTSGGTAALGCLVKDYFPEPVTVSWNSGALTSGVHTFPAVLQSSGLYSLSSVVTVPSSSLGTQTYICNVNHKPSNTKVDKKVEPKSCDKTHTCPPCPAPELLGGPSVFLFPPKPKDTLMISRTPEVTCVVVDVSHEDPEVKFNWYVDGVEVHNAKTKPREEQYNSTYRVVSVLTVLHQDWLNGKEYKCKVSNKALPAPIEKTISKAKGQPREPQVYTLPPSREEMTKNQVSLTCLVKGFYPSDIAVEWESNGQPENNYKTTPPVLDSDGSFFLYSKLTVDKSRWQQGNVFSCSVMHEALHNHYTQKSLSLSPGGGGGSGGGGSEVQLVESGGGLVQPGGSLRLSCAASGYSITNDYAWNWVRQAPGKGLEWVGYISYSGYTTYNPSLKSRFTISRDTSKNTLYLQMNSLRAEDTAVYYCARWTSGLDYWGQGTLVTVSSGGGGSGGGGSGGGGSGGGGSDIQMTQSPSSLSASVGDRVTITCKASDLIHNWLAWYQQKPGKAPKLLIYGATSLETGVPSRFSGSGSGTDFTLTISSLQPEDFATYYCQQYWTTPFTFGQGTKVEIK

SEQ ID NO: 126 - protein, 708 aa, Artificial Sequence
  Description of Artificial Sequence: Synthetic polypeptide
EVQLVESGGGLVQPGGSLRLSCAASGYSITNDYAWNWVRQAPGKGLEWVGYISYSGYTTYNPSLKSRFTISRDTSKNTLYLQMNSLRAEDTAVYYCARWTSGLDYWGQGTLVTVSSASTKGPSVFPLAPSSKSTSGGTAALGCLVKDYFPEPVTVSWNSGALTSGVHTFPAVLQSSGLYSLSSVVTVPSSSLGTQTYICNVNHKPSNTKVDKKVEPKSCDKTHTCPPCPAPELLGGPSVFLFPPKPKDTLMISRTPEVTCVVVDVSHEDPEVKFNWYVDGVEVHNAKTKPREEQYNSTYRVVSVLTVLHQDWLNGKEYKCKVSNKALPAPIEKTISKAKGQPREPQVYTLPPSREEMTKNQVSLTCLVKGFYPSDIAVEWESNGQPENNYKTTPPVLDSDGSFFLYSKLTVDKSRWQQGNVFSCSVMHEALHNHYTQKSLSLSPGGGGGSGGGGSQVQLVQSGAEVKKPGASVKVSCKASGYTFTGYYMHWVRQAPGQGLEWMGWINPDSGGTNYAQKFQGRVTMTRDTSISTAYMELNRLRSDDTAVYYCARDQPLGYCTNGVCSYFDYWGQGTLVTVSSGGGGSGGGGSGGGGSGGGGSDIQMTQSPSSVSASVGDRVTITCRASQGIYSWLAWYQQKPGKAPNLLIYTASTLQSGVPSRFSGSGSGTDFTLTISSLQPEDFATYYCQQANIFPLTFGGGTKVEIK

SEQ ID NO: 127 - protein, 477 aa, Artificial Sequence
  Description of Artificial Sequence: Synthetic polypeptide
DIQMTQSPSSLSASVGDRVTITCKASDLIHNWLAWYQQKPGKAPKLLIYGATSLETGVPSRFSGSGSGTDFTLTISSLQPEDFATYYCQQYWTTPFTFGQGTKVEIKRTVAAPSVFIFPPSDEQLKSGTASVVCLLNNFYPREAKVQWKVDNALQSGNSQESVTEQDSKDSTYSLSSTLTLSKADYEKHKVYACEVTHQGLSSPVTKSFNRGECGGGGSGGGGSQVQLVQSGAEVKKPGASVKVSCKASGYTFTGYYMHWVRQAPGQGLEWMGWINPDSGGTNYAQKFQGRVTMTRDTSISTAYMELNRLRSDDTAVYYCARDQPLGYCTNGVCSYFDYWGQGTLVTVSSGGGGSGGGGSGGGGSGGGGSDIQMTQSPSSVSASVGDRVTITCRASQGIYSWLAWYQQKPGKAPNLLIYTASTLQSGVPSRFSGSGSGTDFTLTISSLQPEDFATYYCQQANIFPLTFGGGTKVEIK

SEQ ID NO: 128 - protein, 446 aa, Artificial Sequence
  Description of Artificial Sequence: Synthetic polypeptide
QVQLQQSGAELVRPGTSVKVSCKASGYAFTNYLIEWVKQRPGQGLEWIGVINPGSGGTNYNEKFKGKATLTADKSSSTAYMQLSSLTSDDSAVYFCARDGPWFAYWGQGTLVTVSAASTKGPSVFPLAPSSKSTSGGTAALGCLVKDYFPEPVTVSWNSGALTSGVHTFPAVLQSSGLYSLSSVVTVPSSSLGTQTYICNVNHKPSNTKVDKKVEPKSCDKTHTCPPCPAPELLGGPSVFLFPPKPKDTLMISRTPEVTCVVVDVSHEDPEVKFNWYVDGVEVHNAKTKPREEQYNSTYRVVSVLTVLHQDWLNGKEYKCKVSNKALPAPIEKTISKAKGQPREPQVYTLPPSREEMTKNQVSLTCLVKGFYPSDIAVEWESNGQPENNYKTTPPVLDSDGSFFLYSKLTVDKSRWQQGNVFSCSVMHEALHNHYTQKSLSLSPGK

SEQ ID NO: 129 - protein, 116 aa, Artificial Sequence
  Description of Artificial Sequence: Synthetic polypeptide
QVQLQQSGAELVRPGTSVKVSCKASGYAFTNYLIEWVKQRPGQGLEWIGVINPGSGGTNYNEKFKGKATLTADKSSSTAYMQLSSLTSDDSAVYFCARDGPWFAYWGQGTLVTVSA

SEQ ID NO: 130 - protein, 8 aa, Artificial Sequence
  Description of Artificial Sequence: Synthetic peptide
GYAFTNYL

SEQ ID NO: 131 - protein, 8 aa, Artificial Sequence
  Description of Artificial Sequence: Synthetic peptide
INPGSGGT

SEQ ID NO: 132 - protein, 9 aa, Artificial Sequence
  Description of Artificial Sequence: Synthetic peptide
ARDGPWFAY

SEQ ID NO: 133 - protein, 214 aa, Artificial Sequence
  Description of Artificial Sequence: Synthetic polypeptide
NIVMTQSPKSMSMSVGERVTLTCKASENVVTYVSWYQQKPEQSPKLLIYGASNRYTGVPDRFTGSGSATDFTLTISSVQAEDLADYHCGQGYSYPYTFGGGTKLEIKRTVAAPSVFIFPPSDEQLKSGTASVVCLLNNFYPREAKVQWKVDNALQSGNSQESVTEQDSKDSTYSLSSTLTLSKADYEKHKVYACEVTHQGLSSPVTKSFNRGEC

SEQ ID NO: 134 - protein, 107 aa, Artificial Sequence
  Description of Artificial Sequence: Synthetic polypeptide
NIVMTQSPKSMSMSVGERVTLTCKASENVVTYVSWYQQKPEQSPKLLIYGASNRYTGVPDRFTGSGSATDFTLTISSVQAEDLADYHCGQGYSYPYTFGGGTKLEIK

SEQ ID NO: 135 - protein, 6 aa, Artificial Sequence
  Description of Artificial Sequence: Synthetic peptide
ENVVTY

SEQ ID NO: 136 - protein, 3 aa, Artificial Sequence
  Description of Artificial Sequence: Synthetic peptide
GAS

SEQ ID NO: 137 - protein, 9 aa, Artificial Sequence
  Description of Artificial Sequence: Synthetic peptide
GQGYSYPYT

SEQ ID NO: 138 - protein, 708 aa, Artificial Sequence
  Description of Artificial Sequence: Synthetic polypeptide
QVQLVQSGAEVKKPGASVKVSCKASGYTFTGYYMHWVRQAPGQGLEWMGWINPDSGGTNYAQKFQGRVTMTRDTSISTAYMELNRLRSDDTAVYYCARDQPLGYCTNGVCSYFDYWGQGTLVTVSSASTKGPSVFPLAPSSKSTSGGTAALGCLVKDYFPEPVTVSWNSGALTSGVHTFPAVLQSSGLYSLSSVVTVPSSSLGTQTYICNVNHKPSNTKVDKKVEPKSCDKTHTCPPCPAPELLGGPSVFLFPPKPKDTLMISRTPEVTCVVVDVSHEDPEVKFNWYVDGVEVHNAKTKPREEQYNSTYRVVSVLTVLHQDWLNGKEYKCKVSNKALPAPIEKTISKAKGQPREPQVYTLPPSREEMTKNQVSLTCLVKGFYPSDIAVEWESNGQPENNYKTTPPVLDSDGSFFLYSKLTVDKSRWQQGNVFSCSVMHEALHNHYTQKSLSLSPGGGGGSGGGGSQVQLQQSGAELVRPGTSVKVSCKASGYAFTNYLIEWVKQRPGQGLEWIGVINPGSGGTNYNEKFKGKATLTADKSSSTAYMQLSSLTSDDSAVYFCARDGPWFAYWGQGTLVTVSAGGGGSGGGGSGGGGSGGGGSNIVMTQSPKSMSMSVGERVTLTCKASENVVTYVSWYQQKPEQSPKLLIYGASNRYTGVPDRFTGSGSATDFTLTISSVQAEDLADYHCGQGYSYPYTFGGGTKLEIK

SEQ ID NO: 139 - protein, 708 aa, Artificial Sequence
  Description of Artificial Sequence: Synthetic polypeptide
QVQLQQSGAELVRPGTSVKVSCKASGYAFTNYLIEWVKQRPGQGLEWIGVINPGSGGTNYNEKFKGKATLTADKSSSTAYMQLSSLTSDDSAVYFCARDGPWFAYWGQGTLVTVSAASTKGPSVFPLAPSSKSTSGGTAALGCLVKDYFPEPVTVSWNSGALTSGVHTFPAVLQSSGLYSLSSVVTVPSSSLGTQTYICNVNHKPSNTKVDKKVEPKSCDKTHTCPPCPAPELLGGPSVFLFPPKPKDTLMISRTPEVTCVVVDVSHEDPEVKFNWYVDGVEVHNAKTKPREEQYNSTYRVVSVLTVLHQDWLNGKEYKCKVSNKALPAPIEKTISKAKGQPREPQVYTLPPSREEMTKNQVSLTCLVKGFYPSDIAVEWESNGQPENNYKTTPPVLDSDGSFFLYSKLTVDKSRWQQGNVFSCSVMHEALHNHYTQKSLSLSPGGGGGSGGGGSQVQLVQSGAEVKKPGASVKVSCKASGYTFTGYYMHWVRQAPGQGLEWMGWINPDSGGTNYAQKFQGRVTMTRDTSISTAYMELNRLRSDDTAVYYCARDQPLGYCTNGVCSYFDYWGQGTLVTVSSGGGGSGGGGSGGGGSGGGGSDIQMTQSPSSVSASVGDRVTITCRASQGIYSWLAWYQQKPGKAPNLLIYTASTLQSGVPSRFSGSGSGTDFTLTISSLQPEDFATYYCQQANIFPLTFGGGTKVEIK

SEQ ID NO: 140 - protein, 477 aa, Artificial Sequence
  Description of Artificial Sequence: Synthetic polypeptide
NIVMTQSPKSMSMSVGERVTLTCKASENVVTYVSWYQQKPEQSPKLLIYGASNRYTGVPDRFTGSGSATDFTLTISSVQAEDLADYHCGQGYSYPYTFGGGTKLEIKRTVAAPSVFIFPPSDEQLKSGTASVVCLLNNFYPREAKVQWKVDNALQSGNSQESVTEQDSKDSTYSLSSTLTLSKADYEKHKVYACEVTHQGLSSPVTKSFNRGECGGGGSGGGGSQVQLVQSGAEVKKPGASVKVSCKASGYTFTGYYMHWVRQAPGQGLEWMGWINPDSGGTNYAQKFQGRVTMTRDTSISTAYMELNRLRSDDTAVYYCARDQPLGYCTNGVCSYFDYWGQGTLVTVSSGGGGSGGGGSGGGGSGGGGSDIQMTQSPSSVSASVGDRVTITCRASQGIYSWLAWYQQKPGKAPNLLIYTASTLQSGVPSRFSGSGSGTDFTLTISSLQPEDFATYYCQQANIFPLTFGGGTKVEIK

SEQ ID NO: 141 - protein, 457 aa, Artificial Sequence
  Description of Artificial Sequence: Synthetic polypeptide
EVQLLESGGGVVQPGRSLRLSCAASGFTFSSYGMHWVRQAPGKGLEWVAVISYDGSNKYYADSVKGRFTISRDNSKNTLYLQMNSLRAEDTAVYYCAKDMGWGSGWRPYYYYGMDVWGQGTTVTVSSASTKGPSVFPLAPSSKSTSGGTAALGCLVKDYFPEPVTVSWNSGALTSGVHTFPAVLQSSGLYSLSSVVTVPSSSLGTQTYICNVNHKPSNTKVDKKVEPKSCDKTHTCPPCPAPELLGGPSVFLFPPKPKDTLMISRTPEVTCVVVDVSHEDPEVKFNWYVDGVEVHNAKTKPREEQYNSTYRVVSVLTVLHQDWLNGKEYKCKVSNKALPAPIEKTISKAKGQPREPQVYTLPPSRDELTKNQVSLTCLVKGFYPSDIAVEWESNGQPENNYKTTPPVLDSDGSFFLYSKLTVDKSRWQQGNVFSCSVMHEALHNHYTQKSLSLSPGK

SEQ ID NO: 142 - protein, 127 aa, Artificial Sequence
  Description of Artificial Sequence: Synthetic polypeptide
EVQLLESGGGVVQPGRSLRLSCAASGFTFSSYGMHWVRQAPGKGLEWVAVISYDGSNKYYADSVKGRFTISRDNSKNTLYLQMNSLRAEDTAVYYCAKDMGWGSGWRPYYYYGMDVWGQGTTVTVSS

SEQ ID NO: 143 - protein, 8 aa, Artificial Sequence
  Description of Artificial Sequence: Synthetic peptide
GFTFSSYG

SEQ ID NO: 144 - protein, 8 aa, Artificial Sequence
  Description of Artificial Sequence: Synthetic peptide
ISYDGSNK

SEQ ID NO: 145 - protein, 20 aa, Artificial Sequence
  Description of Artificial Sequence: Synthetic peptide
AKDMGWGSGWRPYYYYGMDV

SEQ ID NO: 146 - protein, 214 aa, Artificial Sequence
  Description of Artificial Sequence: Synthetic polypeptide
ELQMTQSPSSLSASVGDRVTITCRTSQSISSYLNWYQQKPGQPPKLLIYWASTRESGVPDRFSGSGSGTDFTLTISSLQPEDSATYYCQQSYDIPYTFGQGTKLEIKRTVAAPSVFIFPPSDEQLKSGTASVVCLLNNFYPREAKVQWKVDNALQSGNSQESVTEQDSKDSTYSLSSTLTLSKADYEKHKVYACEVTHQGLSSPVTKSFNRGEC

SEQ ID NO: 147 - protein, 107 aa, Artificial Sequence
  Description of Artificial Sequence: Synthetic polypeptide
ELQMTQSPSSLSASVGDRVTITCRTSQSISSYLNWYQQKPGQPPKLLIYWASTRESGVPDRFSGSGSGTDFTLTISSLQPEDSATYYCQQSYDIPYTFGQGTKLEIK

SEQ ID NO: 148 - protein, 6 aa, Artificial Sequence
  Description of Artificial Sequence: Synthetic peptide
QSISSY

SEQ ID NO: 149 - protein, 3 aa, Artificial Sequence
  Description of Artificial Sequence: Synthetic peptide
WAS

SEQ ID NO: 150 - protein, 9 aa, Artificial Sequence
  Description of Artificial Sequence: Synthetic peptide
QQSYDIPYT

SEQ ID NO: 151 - protein, 719 aa, Artificial Sequence
  Description of Artificial Sequence: Synthetic polypeptide
QVQLVQSGAEVKKPGASVKVSCKASGYTFTGYYMHWVRQAPGQGLEWMGWINPDSGGTNYAQKFQGRVTMTRDTSISTAYMELNRLRSDDTAVYYCARDQPLGYCTNGVCSYFDYWGQGTLVTVSSASTKGPSVFPLAPSSKSTSGGTAALGCLVKDYFPEPVTVSWNSGALTSGVHTFPAVLQSSGLYSLSSVVTVPSSSLGTQTYICNVNHKPSNTKVDKKVEPKSCDKTHTCPPCPAPELLGGPSVFLFPPKPKDTLMISRTPEVTCVVVDVSHEDPEVKFNWYVDGVEVHNAKTKPREEQYNSTYRVVSVLTVLHQDWLNGKEYKCKVSNKALPAPIEKTISKAKGQPREPQVYTLPPSREEMTKNQVSLTCLVKGFYPSDIAVEWESNGQPENNYKTTPPVLDSDGSFFLYSKLTVDKSRWQQGNVFSCSVMHEALHNHYTQKSLSLSPGGGGGSGGGGSEVQLLESGGGVVQPGRSLRLSCAASGFTFSSYGMHWVRQAPGKGLEWVAVISYDGSNKYYADSVKGRFTISRDNSKNTLYLQMNSLRAEDTAVYYCAKDMGWGSGWRPYYYYGMDVWGQGTTVTVSSGGGGSGGGGSGGGGSGGGGSELQMTQSPSSLSASVGDRVTITCRTSQSISSYLNWYQQKPGQPPKLLIYWASTRESGVPDRFSGSGSGTDFTLTISSLQPEDSATYYCQQSYDIPYTFGQGTKLEIK

SEQ ID NO: 152 - protein, 719 aa, Artificial Sequence
  Description of Artificial Sequence: Synthetic polypeptide
EVQLLESGGGVVQPGRSLRLSCAASGFTFSSYGMHWVRQAPGKGLEWVAVISYDGSNKYYADSVKGRFTISRDNSKNTLYLQMNSLRAEDTAVYYCAKDMGWGSGWRPYYYYGMDVWGQGTTVTVSSASTKGPSVFPLAPSSKSTSGGTAALGCLVKDYFPEPVTVSWNSGALTSGVHTFPAVLQSSGLYSLSSVVTVPSSSLGTQTYICNVNHKPSNTKVDKKVEPKSCDKTHTCPPCPAPELLGGPSVFLFPPKPKDTLMISRTPEVTCVVVDVSHEDPEVKFNWYVDGVEVHNAKTKPREEQYNSTYRVVSVLTVLHQDWLNGKEYKCKVSNKALPAPIEKTISKAKGQPREPQVYTLPPSREEMTKNQVSLTCLVKGFYPSDIAVEWESNGQPENNYKTTPPVLDSDGSFFLYSKLTVDKSRWQQGNVFSCSVMHEALHNHYTQKSLSLSPGGGGGSGGGGSQVQLVQSGAEVKKPGASVKVSCKASGYTFTGYYMHWVRQAPGQGLEWMGWINPDSGGTNYAQKFQGRVTMTRDTSISTAYMELNRLRSDDTAVYYCARDQPLGYCTNGVCSYFDYWGQGTLVTVSSGGGGSGGGGSGGGGSGGGGSDIQMTQSPSSVSASVGDRVTITCRASQGIYSWLAWYQQKPGKAPNLLIYTASTLQSGVPSRFSGSGSGTDFTLTISSLQPEDFATYYCQQANIFPLTFGGGTKVEIK

SEQ ID NO: 153 - protein, 477 aa, Artificial Sequence
  Description of Artificial Sequence: Synthetic polypeptide
ELQMTQSPSSLSASVGDRVTITCRTSQSISSYLNWYQQKPGQPPKLLIYWASTRESGVPDRFSGSGSGTDFTLTISSLQPEDSATYYCQQSYDIPYTFGQGTKLEIKRTVAAPSVFIFPPSDEQLKSGTASVVCLLNNFYPREAKVQWKVDNALQSGNSQESVTEQDSKDSTYSLSSTLTLSKADYEKHKVYACEVTHQGLSSPVTKSFNRGECGGGGSGGGGSQVQLVQSGAEVKKPGASVKVSCKASGYTFTGYYMHWVRQAPGQGLEWMGWINPDSGGTNYAQKFQGRVTMTRDTSISTAYMELNRLRSDDTAVYYCARDQPLGYCTNGVCSYFDYWGQGTLVTVSSGGGGSGGGGSGGGGSGGGGSDIQMTQSPSSVSASVGDRVTITCRASQGIYSWLAWYQQKPGKAPNLLIYTASTLQSGVPSRFSGSGSGTDFTLTISSLQPEDFATYYCQQANIFPLTFGGGTKVEIK

SEQ ID NO: 154 - protein, 450 aa, Artificial Sequence
  Description of Artificial Sequence: Synthetic polypeptide
QVELVQSGAEVKKPGESLKISCKGSGYSFTSYWIGWVRQAPGKGLEWMGIIDPGDSRTRYSPSFQGQVTISADKSISTAYLQWSSLKASDTAMYYCARGQLYGGTYMDGWGQGTLVTVSSASTKGPSVFPLAPSSKSTSGGTAALGCLVKDYFPEPVTVSWNSGALTSGVHTFPAVLQSSGLYSLSSVVTVPSSSLGTQTYICNVNHKPSNTKVDKKVEPKSCDKTHTCPPCPAPELLGGPSVFLFPPKPKDTLMISRTPEVTCVVVDVSHEDPEVKFNWYVDGVEVHNAKTKPREEQYNSTYRVVSVLTVLHQDWLNGKEYKCKVSNKALPAPIEKTISKAKGQPREPQVYTLPPSRDELTKNQVSLTCLVKGFYPSDIAVEWESNGQPENNYKTTPPVLDSDGSFFLYSKLTVDKSRWQQGNVFSCSVMHEALHNHYTQKSLSLSPGK

SEQ ID NO: 155 - protein, 120 aa, Artificial Sequence
  Description of Artificial Sequence: Synthetic polypeptide
QVELVQSGAEVKKPGESLKISCKGSGYSFTSYWIGWVRQAPGKGLEWMGIIDPGDSRTRYSPSFQGQVTISADKSISTAYLQWSSLKASDTAMYYCARGQLYGGTYMDGWGQGTLVTVSS

SEQ ID NO: 156 - protein, 8 aa, Artificial Sequence
  Description of Artificial Sequence: Synthetic peptide
GYSFTSYW

SEQ ID NO: 157 - protein, 8 aa, Artificial Sequence
  Description of Artificial Sequence: Synthetic peptide
IDPGDSRT

SEQ ID NO: 158 - protein, 13 aa, Artificial Sequence
  Description of Artificial Sequence: Synthetic peptide
ARGQLYGGTYMDG

SEQ ID NO: 159 - protein, 217 aa, Artificial Sequence
  Description of Artificial Sequence: Synthetic polypeptide
DIALTQPASVSGSPGQSITISCTGTSSDIGGYNSVSWYQQHPGKAPKLMIYGVNNRPSGVSNRFSGSKSGNTASLTISGLQAEDEADYYCSSYDIESATPVFGGGTKLTVLGQPKAAPSVTLFPPSSEELQANKATLVCLISDFYPGAVTVAWKGDSSPVKAGVETTTPSKQSNNKYAASSYLSLTPEQWKSHRSYSCQVTHEGSTVEKTVAPTECS

SEQ ID NO: 160 - protein, 111 aa, Artificial Sequence
  Description of Artificial Sequence: Synthetic polypeptide
DIALTQPASVSGSPGQSITISCTGTSSDIGGYNSVSWYQQHPGKAPKLMIYGVNNRPSGVSNRFSGSKSGNTASLTISGLQAEDEADYYCSSYDIESATPVFGGGTKLTVL

SEQ ID NO: 161 - protein, 9 aa, Artificial Sequence
  Description of Artificial Sequence: Synthetic peptide
SSDIGGYNS

SEQ ID NO: 162 - protein, 3 aa, Artificial Sequence
  Description of Artificial Sequence: Synthetic peptide
GVN

SEQ ID NO: 163 - protein, 11 aa, Artificial Sequence
  Description of Artificial Sequence: Synthetic peptide
SSYDIESATPV

SEQ ID NO: 164 - protein, 716 aa, Artificial Sequence
  Description of Artificial Sequence: Synthetic polypeptide
QVQLVQSGAEVKKPGASVKVSCKASGYTFTGYYMHWVRQAPGQGLEWMGWINPDSGGTNYAQKFQGRVTMTRDTSISTAYMELNRLRSDDTAVYYCARDQPLGYCTNGVCSYFDYWGQGTLVTVSSASTKGPSVFPLAPSSKSTSGGTAALGCLVKDYFPEPVTVSWNSGALTSGVHTFPAVLQSSGLYSLSSVVTVPSSSLGTQTYICNVNHKPSNTKVDKKVEPKSCDKTHTCPPCPAPELLGGPSVFLFPPKPKDTLMISRTPEVTCVVVDVSHEDPEVKFNWYVDGVEVHNAKTKPREEQYNSTYRVVSVLTVLHQDWLNGKEYKCKVSNKALPAPIEKTISKAKGQPREPQVYTLPPSREEMTKNQVSLTCLVKGFYPSDIAVEWESNGQPENNYKTTPPVLDSDGSFFLYSKLTVDKSRWQQGNVFSCSVMHEALHNHYTQKSLSLSPGGGGGSGGGGSQVELVQSGAEVKKPGESLKISCKGSGYSFTSYWIGWVRQAPGKGLEWMGIIDPGDSRTRYSPSFQGQVTISADKSISTAYLQWSSLKASDTAMYYCARGQLYGGTYMDGWGQGTLVTVSSGGGGSGGGGSGGGGSGGGGSDIALTQPASVSGSPGQSITISCTGTSSDIGGYNSVSWYQQHPGKAPKLMIYGVNNRPSGVSNRFSGSKSGNTASLTISGLQAEDEADYYCSSYDIESATPVFGGGTKLTVL

SEQ ID NO: 165 - protein, 712 aa, Artificial Sequence
  Description of Artificial Sequence: Synthetic polypeptide
QVELVQSGAEVKKPGESLKISCKGSGYSFTSYWIGWVRQAPGKGLEWMGIIDPGDSRTRYSPSFQGQVTISADKSISTAYLQWSSLKASDTAMYYCARGQLYGGTYMDGWGQGTLVTVSSASTKGPSVFPLAPSSKSTSGGTAALGCLVKDYFPEPVTVSWNSGALTSGVHTFPAVLQSSGLYSLSSVVTVPSSSLGTQTYICNVNHKPSNTKVDKKVEPKSCDKTHTCPPCPAPELLGGPSVFLFPPKPKDTLMISRTPEVTCVVVDVSHEDPEVKFNWYVDGVEVHNAKTKPREEQYNSTYRVVSVLTVLHQDWLNGKEYKCKVSNKALPAPIEKTISKAKGQPREPQVYTLPPSREEMTKNQVSLTCLVKGFYPSDIAVEWESNGQPENNYKTTPPVLDSDGSFFLYSKLTVDKSRWQQGNVFSCSVMHEALHNHYTQKSLSLSPGGGGGSGGGGSQVQLVQSGAEVKKPGASVKVSCKASGYTFTGYYMHWVRQAPGQGLEWMGWINPDSGGTNYAQKFQGRVTMTRDTSISTAYMELNRLRSDDTAVYYCARDQPLGYCTNGVCSYFDYWGQGTLVTVSSGGGGSGGGGSGGGGSGGGGSDIQMTQSPSSVSASVGDRVTITCRASQGIYSWLAWYQQKPGKAPNLLIYTASTLQSGVPSRFSGSGSGTDFTLTISSLQPEDFATYYCQQANIFPLTFGGGTKVEIK

SEQ ID NO: 166 - protein, 480 aa, Artificial Sequence
  Description of Artificial Sequence: Synthetic polypeptide
DIALTQPASVSGSPGQSITISCTGTSSDIGGYNSVSWYQQHPGKAPKLMIYGVNNRPSGVSNRFSGSKSGNTASLTISGLQAEDEADYYCSSYDIESATPVFGGGTKLTVLGQPKAAPSVTLFPPSSEELQANKATLVCLISDFYPGAVTVAWKGDSSPVKAGVETTTPSKQSNNKYAASSYLSLTPEQWKSHRSYSCQVTHEGSTVEKTVAPTECSGGGGSGGGGSQVQLVQSGAEVKKPGASVKVSCKASGYTFTGYYMHWVRQAPGQGLEWMGWINPDSGGTNYAQKFQGRVTMTRDTSISTAYMELNRLRSDDTAVYYCARDQPLGYCTNGVCSYFDYWGQGTLVTVSSGGGGSGGGGSGGGGSGGGGSDIQMTQSPSSVSASVGDRVTITCRASQGIYSWLAWYQQKPGKAPNLLIYTASTLQSGVPSRFSGSGSGTDFTLTISSLQPEDFATYYCQQANIFPLTFGGGTKVEIK

SEQ ID NO: 167 - protein, 446 aa, Artificial Sequence
  Description of Artificial Sequence: Synthetic polypeptide
QAQLVQSGAEVVKPGASVKMSCKASGYTFTSYNMHWVKQTPGQGLEWIGYIYPGNGATNYNQKFQGKATLTADPSSSTAYMQISSLTSEDSAVYFCARGDSVPFAYWGQGTLVTVSAASTKGPSVFPLAPSSKSTSGGTAALGCLVKDYFPEPVTVSWNSGALTSGVHTFPAVLQSSGLYSLSSVVTVPSSSLGTQTYICNVNHKPSNTKVDKKVEPKSCDKTHTCPPCPAPELLGGPSVFLFPPKPKDTLMISRTPEVTCWVDVSHEDPEVKFNWYVDGVEVHNAKTKPREEQYNSTYRVVSVLTVLHQDWLNGKEYKCKVSNKALPAPIEKTISKAKGQPREPQVYTLPPSRDELTKNQVSLTCLVKGFYPSDIAVEWESNGQPENNYKTTPPVLDSDGSFFLYSKLTVDKSRWQQGNVFSCSVMHEALHNHYTQKSLSLSPGK

SEQ ID NO: 168 - protein, 117 aa, Artificial Sequence
  Description of Artificial Sequence: Synthetic polypeptide
QAQLVQSGAEVVKPGASVKMSCKASGYTFTSYNMHWVKQTPGQGLEWIGYIYPGNGATNYNQKFQGKATLTADPSSSTAYMQISSLTSEDSAVYFCARGDSVPFAYWGQGTLVTVSA

SEQ ID NO: 169 - protein, 8 aa, Artificial Sequence
  Description of Artificial Sequence: Synthetic peptide
GYTFTSYN

SEQ ID NO: 170 - protein, 8 aa, Artificial Sequence
  Description of Artificial Sequence: Synthetic peptide
IYPGNGAT

SEQ ID NO: 171 - protein, 10 aa, Artificial Sequence
  Description of Artificial Sequence: Synthetic peptide
ARGDSVPFAY

SEQ ID NO: 172 - protein, 213 aa, Artificial Sequence
  Description of Artificial Sequence: Synthetic polypeptide
EIVLTQSPATMSASPGERVTITCSAHSSVSFMHWFQQKPGTSPKLWIYSTSSLASGVPARFGGSGSGTSYSLTISSMEAEDAATYYCQQRSSFPLTFGAGTKLELKRTVAAPSVFIFPPSDEQLKSGTASVVCLLNNFYPREAKVQWKVDNALQSGNSQESVTEQDSKDSTYSLSSTLTLSKADYEKHKVYACEVTHQGLSSPVTKSFNRGEC

SEQ ID NO: 173 - protein, 106 aa, Artificial Sequence
  Description of Artificial Sequence: Synthetic polypeptide
EIVLTQSPATMSASPGERVTITCSAHSSVSFMHWFQQKPGTSPKLWIYSTSSLASGVPARFGGSGSGTSYSLTISSMEAEDAATYYCQQRSSFPLTFGAGTKLELK

SEQ ID NO: 174 - protein, 5 aa, Artificial Sequence
  Description of Artificial Sequence: Synthetic peptide
SSVSF

SEQ ID NO: 175 - protein, 3 aa, Artificial Sequence
  Description of Artificial Sequence: Synthetic peptide
STS

SEQ ID NO: 176 - protein, 9 aa, Artificial Sequence
  Description of Artificial Sequence: Synthetic peptide
QQRSSFPLT

SEQ ID NO: 177 - protein, 708 aa, Artificial Sequence
  Description of Artificial Sequence: Synthetic polypeptide
QVQLVQSGAEVKKPGASVKVSCKASGYTFTGYYMHWVRQAPGQGLEWMGWINPDSGGTNYAQKFQGRVTMTRDTSISTAYMELNRLRSDDTAVYYCARDQPLGYCTNGVCSYFDYWGQGTLVTVSSASTKGPSVFPLAPSSKSTSGGTAALGCLVKDYFPEPVTVSWNSGALTSGVHTFPAVLQSSGLYSLSSVVTVPSSSLGTQTYICNVNHKPSNTKVDKKVEPKSCDKTHTCPPCPAPELLGGPSVFLFPPKPKDTLMISRTPEVTCVVVDVSHEDPEVKFNWYVDGVEVHNAKTKPREEQYNSTYRVVSVLTVLHQDWLNGKEYKCKVSNKALPAPIEKTISKAKGQPREPQVYTLPPSREEMTKNQVSLTCLVKGFYPSDIAVEWESNGQPENNYKTTPPVLDSDGSFFLYSKLTVDKSRWQQGNVFSCSVMHEALHNHYTQKSLSLSPGGGGGSGGGGSQAQLVQSGAEVVKPGASVKMSCKASGYTFTSYNMHWVKQTPGQGLEWIGYIYPGNGATNYNQKFQGKATLTADPSSSTAYMQISSLTSEDSAVYFCARGDSVPFAYWGQGTLVTVSAGGGGSGGGGSGGGGSGGGGSEIVLTQSPATMSASPGERVTITCSAHSSVSFMHWFQQKPGTSPKLWIYSTSSLASGVPARFGGSGSGTSYSLTISSMEAEDAATYYCQQRSSFPLTFGAGTKLELK

SEQ ID NO: 178 - protein, 709 aa, Artificial Sequence
  Description of Artificial Sequence: Synthetic polypeptide
QAQLVQSGAEVVKPGASVKMSCKASGYTFTSYNMHWVKQTPGQGLEWIGYIYPGNGATNYNQKFQGKATLTADPSSSTAYMQISSLTSEDSAVYFCARGDSVPFAYWGQGTLVTVSAASTKGPSVFPLAPSSKSTSGGTAALGCLVKDYFPEPVTVSWNSGALTSGVHTFPAVLQSSGLYSLSSVVTVPSSSLGTQTYICNVNHKPSNTKVDKKVEPKSCDKTHTCPPCPAPELLGGPSVFLFPPKPKDTLMISRTPEVTCVVVDVSHEDPEVKFNWYVDGVEVHNAKTKPREEQYNSTYRVVSVLTVLHQDWLNGKEYKCKVSNKALPAPIEKTISKAKGQPREPQVYTLPPSREEMTKNQVSLTCLVKGFYPSDIAVEWESNGQPENNYKTTPPVLDSDGSFFLYSKLTVDKSRWQQGNVFSCSVMHEALHNHYTQKSLSLSPGGGGGSGGGGSQVQLVQSGAEVKKPGASVKVSCKASGYTFTGYYMHWVRQAPGQGLEWMGWINPDSGGTNYAQKFQGRVTMTRDTSISTAYMELNRLRSDDTAVYYCARDQPLGYCTNGVCSYFDYWGQGTLVTVSSGGGGSGGGGSGGGGSGGGGSDIQMTQSPSSVSASVGDRVTITCRASQGIYSWLAWYQQKPGKAPNLLIYTASTLQSGVPSRFSGSGSGTDFTLTISSLQPEDFATYYCQQANIFPLTFGGGTKVEIK

SEQ ID NO: 179 - protein, 476 aa, Artificial Sequence
  Description of Artificial Sequence: Synthetic polypeptide
EIVLTQSPATMSASPGERVTITCSAHSSVSFMHWFQQKPGTSPKLWIYSTSSLASGVPARFGGSGSGTSYSLTISSMEAEDAATYYCQQRSSFPLTFGAGTKLELKRTVAAPSVFIFPPSDEQLKSGTASVVCLLNNFYPREAKVQWKVDNALQSGNSQESVTEQDSKDSTYSLSSTLTLSKADYEKHKVYACEVTHQGLSSPVTKSFNRGECGGGGSGGGGSQVQLVQSGAEVKKPGASVKVSCKASGYTFTGYYMHWVRQAPGQGLEWMGWINPDSGGTNYAQKFQGRVTMTRDTSISTAYMELNRLRSDDTAVYYCARDQPLGYCTNGVCSYFDYWGQGTLVTVSSGGGGSGGGGSGGGGSGGGGSDIQMTQSPSSVSASVGDRVTITCRASQGIYSWLAWYQQKPGKAPNLLIYTASTLQSGVPSRFSGSGSGTDFTLTISSLQPEDFATYYCQQANIFPLTFGGGTKVEIK

SEQ ID NO: 180 - protein, 450 aa, Artificial Sequence
  Description of Artificial Sequence: Synthetic polypeptide
EVQLVESGGGLVQPGGSLRLSCAASGFSFSDFAMSWVRQAPGKGLEWVATIGRVAFHTYYPDSMKGRFTISRDNSKNTLYLQMNSLRAEDTAVYYCARHRGFDVGHFDFWGQGTLVTVSSASTKGPSVFPLAPSSKSTSGGTAALGCLVKDYFPEPVTVSWNSGALTSGVHTFPAVLQSSGLYSLSSVVTVPSSSLGTQTYICNVNHKPSNTKVDKKVEPKSCDKTHTCPPCPAPELLGGPSVFLFPPKPKDTLMISRTPEVTCVVVDVSHEDPEVKFNWYVDGVEVHNAKTKPREEQYNSTYRVVSVLTVLHQDWLNGKEYKCKVSNKALPAPIEKTISKAKGQPREPQVYTLPPSREEMTKNQVSLTCLVKGFYPSDIAVEWESNGQPENNYKTTPPVLDSDGSFFLYSKLTVDKSRWQQGNVFSCSVMHEALHNHYTQKSLSLSPGK

SEQ ID NO: 181 - protein, 120 aa, Artificial Sequence
  Description of Artificial Sequence: Synthetic polypeptide
EVQLVESGGGLVQPGGSLRLSCAASGFSFSDFAMSWVRQAPGKGLEWVATIGRVAFHTYYPDSMKGRFTISRDNSKNTLYLQMNSLRAEDTAVYYCARHRGFDVGHFDFWGQGTLVTVSS

SEQ ID NO: 182 - protein, 8 aa, Artificial Sequence
  Description of Artificial Sequence: Synthetic peptide
GFSFSDFA

SEQ ID NO: 183 - protein, 8 aa, Artificial Sequence
  Description of Artificial Sequence: Synthetic peptide
IGRVAFHT

SEQ ID NO: 184 - protein, 13 aa, Artificial Sequence
  Description of Artificial Sequence: Synthetic peptide
ARHRGFDVGHFDF

SEQ ID NO: 185 - protein, 219 aa, Artificial Sequence
  Description of Artificial Sequence: Synthetic polypeptide
DIQMTQSPSSLSASVGDRVTITCRSSETLVHSSGNTYLEWYQQKPGKAPKLLIYRVSNRFSGVPSRFSGSGSGTDFTLTISSLQPEDFATYYCFQGSFNPLTFGQGTKVEIKRTVAAPSVFIFPPSDEQLKSGTASVVCLLNNFYPREAKVQWKVDNALQSGNSQESVTEQDSKDSTYSLSSTLTLSKADYEKHKVYACEVTHQGLSSPVTKSFNRGEC

SEQ ID NO: 186 - protein, 112 aa, Artificial Sequence
  Description of Artificial Sequence: Synthetic polypeptide
DIQMTQSPSSLSASVGDRVTITCRSSETLVHSSGNTYLEWYQQKPGKAPKLLIYRVSNRFSGVPSRFSGSGSGTDFTLTISSLQPEDFATYYCFQGSFNPLTFGQGTKVEIK

SEQ ID NO: 187 - protein, 11 aa, Artificial Sequence
  Description of Artificial Sequence: Synthetic peptide
ETLVHSSGNTY

SEQ ID NO: 188 - protein, 3 aa, Artificial Sequence
  Description of Artificial Sequence: Synthetic peptide
RVS

SEQ ID NO: 189 - protein, 9 aa, Artificial Sequence
  Description of Artificial Sequence: Synthetic peptide
FQGSFNPLT

SEQ ID NO: 190 - protein, 717 aa, Artificial Sequence
  Description of Artificial Sequence: Synthetic polypeptide
QVQLVQSGAEVKKPGASVKVSCKASGYTFTGYYMHWVRQAPGQGLEWMGWINPDSGGTNYAQKFQGRVTMTRDTSISTAYMELNRLRSDDTAVYYCARDQPLGYCTNGVCSYFDYWGQGTLVTVSSASTKGPSVFPLAPSSKSTSGGTAALGCLVKDYFPEPVTVSWNSGALTSGVHTFPAVLQSSGLYSLSSVVTVPSSSLGTQTYICNVNHKPSNTKVDKKVEPKSCDKTHTCPPCPAPELLGGPSVFLFPPKPKDTLMISRTPEVTCVVVDVSHEDPEVKFNWYVDGVEVHNAKTKPREEQYNSTYRVVSVLTVLHQDWLNGKEYKCKVSNKALPAPIEKTISKAKGQPREPQVYTLPPSREEMTKNQVSLTCLVKGFYPSDIAVEWESNGQPENNYKTTPPVLDSDGSFFLYSKLTVDKSRWQQGNVFSCSVMHEALHNHYTQKSLSLSPGGGGGSGGGGSEVQLVESGGGLVQPGGSLRLSCAASGFSFSDFAMSWVRQAPGKGLEWVATIGRVAFHTYYPDSMKGRFTISRDNSKNTLYLQMNSLRAEDTAVYYCARHRGFDVGHFDFWGQGTLVTVSSGGGGSGGGGSGGGGSGGGGSDIQMTQSPSSLSASVGDRVTITCRSSETLVHSSGNTYLEWYQQKPGKAPKLLIYRVSNRFSGVPSRFSGSGSGTDFTLTISSLQPEDFATYYCFQGSFNPLTFGQGTKVEIK

SEQ ID NO: 191 - protein, 712 aa, Artificial Sequence
  Description of Artificial Sequence: Synthetic polypeptide
EVQLVESGGGLVQPGGSLRLSCAASGFSFSDFAMSWVRQAPGKGLEWVATIGRVAFHTYYPDSMKGRFTISRDNSKNTLYLQMNSLRAEDTAVYYCARHRGFDVGHFDFWGQGTLVTVSSASTKGPSVFPLAPSSKSTSGGTAALGCLVKDYFPEPVTVSWNSGALTSGVHTFPAVLQSSGLYSLSSVVTVPSSSLGTQTYICNVNHKPSNTKVDKKVEPKSCDKTHTCPPCPAPELLGGPSVFLFPPKPKDTLMISRTPEVTCVVVDVSHEDPEVKFNWYVDGVEVHNAKTKPREEQYNSTYRVVSVLTVLHQDWLNGKEYKCKVSNKALPAPIEKTISKAKGQPREPQVYTLPPSREEMTKNQVSLTCLVKGFYPSDIAVEWESNGQPENNYKTTPPVLDSDGSFFLYSKLTVDKSRWQQGNVFSCSVMHEALHNHYTQKSLSLSPGGGGGSGGGGSQVQLVQSGAEVKKPGASVKVSCKASGYTFTGYYMHWVRQAPGQGLEWMGWINPDSGGTNYAQKFQGRVTMTRDTSISTAYMELNRLRSDDTAVYYCARDQPLGYCTNGVCSYFDYWGQGTLVTVSSGGGGSGGGGSGGGGSGGGGSDIQMTQSPSSVSASVGDRVTITCRASQGIYSWLAWYQQKPGKAPNLLIYTASTLQSGVPSRFSGSGSGTDFTLTISSLQPEDFATYYCQQANIFPLTFGGGTKVEIK

SEQ ID NO: 192 - protein, 482 aa, Artificial Sequence
  Description of Artificial Sequence: Synthetic polypeptide
DIQMTQSPSSLSASVGDRVTITCRSSETLVHSSGNTYLEWYQQKPGKAPKLLIYRVSNRFSGVPSRFSGSGSGTDFTLTISSLQPEDFATYYCFQGSFNPLTFGQGTKVEIKRTVAAPSVFIFPPSDEQLKSGTASVVCLLNNFYPREAKVQWKVDNALQSGNSQESVTEQDSKDSTYSLSSTLTLSKADYEKHKVYACEVTHQGLSSPVTKSFNRGECGGGGSGGGGSQVQLVQSGAEVKKPGASVKVSCKASGYTFTGYYMHWVRQAPGQGLEWMGWINPDSGGTNYAQKFQGRVTMTRDTSISTAYMELNRLRSDDTAVYYCARDQPLGYCTNGVCSYFDYWGQGTLVTVSSGGGGSGGGGSGGGGSGGGGSDIQMTQSPSSVSASVGDRVTITCRASQGIYSWLAWYQQKPGKAPNLLIYTASTLQSGVPSRFSGSGSGTDFTLTISSLQPEDFATYYCQQANIFPLTFGGGTKVEIK

SEQ ID NO: 193 - protein, 451 aa, Artificial Sequence
  Description of Artificial Sequence: Synthetic polypeptide
QVQLQQSGSELKKPGASVKVSCKASGYTFTNYGMNWVKQAPGQGLKWMGWINTYTGEPTYTDDFKGRFAFSLDTSVSTAYLQISSLKADDTAVYFCARGGFGSSYWYFDVWGQGSLVTVSSASTKGPSVFPLAPSSKSTSGGTAALGCLVKDYFPEPVTVSWNSGALTSGVHTFPAVLQSSGLYSLSSVVTVPSSSLGTQTYICNVNHKPSNTKVDKRVEPKSCDKTHTCPPCPAPELLGGPSVFLFPPKPKDTLMISRTPEVTCVVVDVSHEDPEVKFNWYVDGVEVHNAKTKPREEQYNSTYRVVSVLTVLHQDWLNGKEYKCKVSNKALPAPIEKTISKAKGQPREPQVYTLPPSREEMTKNQVSLTCLVKGFYPSDIAVEWESNGQPENNYKTTPPVLDSDGSFFLYSKLTVDKSRWQQGNVFSCSVMHEALHNHYTQKSLSLSPGK

SEQ ID NO: 194 - protein, 121 aa, Artificial Sequence
  Description of Artificial Sequence: Synthetic polypeptide
QVQLQQSGSELKKPGASVKVSCKASGYTFTNYGMNWVKQAPGQGLKWMGWINTYTGEPTYTDDFKGRFAFSLDTSVSTAYLQISSLKADDTAVYFCARGGFGSSYWYFDVWGQGSLVTVSS

SEQ ID NO: 195 - protein, 8 aa, Artificial Sequence
  Description of Artificial Sequence: Synthetic peptide
GYTFTNYG

SEQ ID NO: 196 - protein, 8 aa, Artificial Sequence
  Description of Artificial Sequence: Synthetic peptide
INTYTGEP

SEQ ID NO: 197 - protein, 14 aa, Artificial Sequence
  Description of Artificial Sequence: Synthetic peptide
ARGGFGSSYWYFDV

SEQ ID NO: 198 - protein, 214 aa, Artificial Sequence
  Description of Artificial Sequence: Synthetic polypeptide
DIQLTQSPSSLSASVGDRVSITCKASQDVSIAVAWYQQKPGKAPKLLIYSASYRYTGVPDRFSGSGSGTDFTLTISSLQPEDFAVYYCQQHYITPLTFGAGTKVEIKRTVAAPSVFIFPPSDEQLKSGTASVVCLLNNFYPREAKVQWKVDNALQSGNSQESVTEQDSKDSTYSLSSTLTLSKADYEKHKVYACEVTHQGLSSPVTKSFNRGEC

SEQ ID NO: 199 - protein, 107 aa, Artificial Sequence
  Description of Artificial Sequence: Synthetic polypeptide
DIQLTQSPSSLSASVGDRVSITCKASQDVSIAVAWYQQKPGKAPKLLIYSASYRYTGVPDRFSGSGSGTDFTLTISSLQPEDFAVYYCQQHYITPLTFGAGTKVEIK

SEQ ID NO: 200 - protein, 6 aa, Artificial Sequence
  Description of Artificial Sequence: Synthetic peptide
QDVSIA

SEQ ID NO: 201 - protein, 3 aa, Artificial Sequence
  Description of Artificial Sequence: Synthetic peptide
SAS

SEQ ID NO: 202 - protein, 9 aa, Artificial Sequence
  Description of Artificial Sequence: Synthetic peptide
QQHYITPLT

SEQ ID NO: 203 - protein, 713 aa, Artificial Sequence
  Description of Artificial Sequence: Synthetic polypeptide
QVQLVQSGAEVKKPGASVKVSCKASGYTFTGYYMHWVRQAPGQGLEWMGWINPDSGGTNYAQKFQGRVTMTRDTSISTAYMELNRLRSDDTAVYYCARDQPLGYCTNGVCSYFDYWGQGTLVTVSSASTKGPSVFPLAPSSKSTSGGTAALGCLVKDYFPEPVTVSWNSGALTSGVHTFPAVLQSSGLYSLSSVVTVPSSSLGTQTYICNVNHKPSNTKVDKKVEPKSCDKTHTCPPCPAPELLGGPSVFLFPPKPKDTLMISRTPEVTCVVVDVSHEDPEVKFNWYVDGVEVHNAKTKPREEQYNSTYRVVSVLTVLHQDWLNGKEYKCKVSNKALPAPIEKTISKAKGQPREPQVYTLPPSREEMTKNQVSLTCLVKGFYPSDIAVEWESNGQPENNYKTTPPVLDSDGSFFLYSKLTVDKSRWQQGNVFSCSVMHEALHNHYTQKSLSLSPGGGGGSGGGGSQVQLQQSGSELKKPGASVKVSCKASGYTFTNYGMNWVKQAPGQGLKWMGWINTYTGEPTYTDDFKGRFAFSLDTSVSTAYLQISSLKADDTAVYFCARGGFGSSYWYFDVWGQGSLVTVSSGGGGSGGGGSGGGGSGGGGSDIQLTQSPSSLSASVGDRVSITCKASQDVSIAVAWYQQKPGKAPKLLIYSASYRYTGVPDRFSGSGSGTDFTLTISSLQPEDFAVYYCQQHYITPLTFGAGTKVEIK

SEQ ID NO: 204 - protein, 713 aa, Artificial Sequence
  Description of Artificial Sequence: Synthetic polypeptide
QVQLQQSGSELKKPGASVKVSCKASGYTFTNYGMNWVKQAPGQGLKWMGWINTYTGEPTYTDDFKGRFAFSLDTSVSTAYLQISSLKADDTAVYFCARGGFGSSYWYFDVWGQGSLVTVSSASTKGPSVFPLAPSSKSTSGGTAALGCLVKDYFPEPVTVSWNSGALTSGVHTFPAVLQSSGLYSLSSVVTVPSSSLGTQTYICNVNHKPSNTKVDKKVEPKSCDKTHTCPPCPAPELLGGPSVFLFPPKPKDTLMISRTPEVTCVVVDVSHEDPEVKFNWYVDGVEVHNAKTKPREEQYNSTYRVVSVLTVLHQDWLNGKEYKCKVSNKALPAPIEKTISKAKGQPREPQVYTLPPSREEMTKNQVSLTCLVKGFYPSDIAVEWESNGQPENNYKTTPPVLDSDGSFFLYSKLTVDKSRWQQGNVFSCSVMHEALHNHYTQKSLSLSPGGGGGSGGGGSQVQLVQSGAEVKKPGASVKVSCKASGYTFTGYYMHWVRQAPGQGLEWMGWINPDSGGTNYAQKFQGRVTMTRDTSISTAYMELNRLRSDDTAVYYCARDQPLGYCTNGVCSYFDYWGQGTLVTVSSGGGGSGGGGSGGGGSGGGGSDIQMTQSPSSVSASVGDRVTITCRASQGIYSWLAWYQQKPGKAPNLLIYTASTLQSGVPSRFSGSGSGTDFTLTISSLQPEDFATYYCQQANIFPLTFGGGTKVEIK

SEQ ID NO: 205 - protein, 477 aa, Artificial Sequence
  Description of Artificial Sequence: Synthetic polypeptide
DIQLTQSPSSLSASVGDRVSITCKASQDVSIAVAWYQQKPGKAPKLLIYSASYRYTGVPDRFSGSGSGTDFTLTISSLQPEDFAVYYCQQHYITPLTFGAGTKVEIKRTVAAPSVFIFPPSDEQLKSGTASVVCLLNNFYPREAKVQWKVDNALQSGNSQESVTEQDSKDSTYSLSSTLTLSKADYEKHKVYACEVTHQGLSSPVTKSFNRGECGGGGSGGGGSQVQLVQSGAEVKKPGASVKVSCKASGYTFTGYYMHWVRQAPGQGLEWMGWINPDSGGTNYAQKFQGRVTMTRDTSISTAYMELNRLRSDDTAVYYCARDQPLGYCTNGVCSYFDYWGQGTLVTVSSGGGGSGGGGSGGGGSGGGGSDIQMTQSPSSVSASVGDRVTITCRASQGIYSWLAWYQQKPGKAPNLLIYTASTLQSGVPSRFSGSGSGTDFTLTISSLQPEDFATYYCQQANIFPLTFGGGTKVEIK

SEQ ID NO: 206 - protein, 451 aa, Artificial Sequence
  Description of Artificial Sequence: Synthetic polypeptide
QVKLQQSGPELKKPGETVKISCKASGYTFTEFGMNWVKQAPGKGLKWMGWINTKTGEATYVEEFKGRFAFSLETSATTAYLQINNLKNEDTAKYFCARWDFYDYVEAMDYWGQGTTVTVSSASTKGPSVFPLAPSSKSTSGGTAALGCLVKDYFPEPVTVSWNSGALTSGVHTFPAVLQSSGLYSLSSVVTVPSSSLGTQTYICNVNHKPSNTKVDKKVEPKSCDKTHTCPPCPAPELLGGPSVFLFPPKPKDTLMISRTPEVTCVVVDVSHEDPEVKFNWYVDGVEVHNAKTKPREEQYNSTYRVVSVLTVLHQDWLNGKEYKCKVSNKALPAPIEKTISKAKGQPREPQVYTLPPSRDELTKNQVSLTCLVKGFYPSDIAVEWESNGQPENNYKTTPPVLDSDGSFFLYSKLTVDKSRWQQGNVFSCSVMHEALHNHYTQKSLSLSPGK

SEQ ID NO: 207 - protein, 121 aa, Artificial Sequence
  Description of Artificial Sequence: Synthetic polypeptide
QVKLQQSGPELKKPGETVKISCKASGYTFTEFGMNWVKQAPGKGLKWMGWINTKTGEATYVEEFKGRFAFSLETSATTAYLQINNLKNEDTAKYFCARWDFYDYVEAMDYWGQGTTVTVSS

SEQ ID NO: 208 - protein, 8 aa, Artificial Sequence
  Description of Artificial Sequence: Synthetic peptide
GYTFTEFG

SEQ ID NO: 209 - protein, 8 aa, Artificial Sequence
  Description of Artificial Sequence: Synthetic peptide
INTKTGEA

SEQ ID NO: 210 - protein, 14 aa, Artificial Sequence
  Description of Artificial Sequence: Synthetic peptide
ARWDFYDYVEAMDY

SEQ ID NO: 211 - protein, 215 aa, Artificial Sequence
  Description of Artificial Sequence: Synthetic polypeptide
DIVMTQSQRFMSTSVGDRVSVTCKASQNVGTNVAWYQQKPGQSPKALIYSASYRYSGVPDRFTGSGSGTDFTLTISNVQSEDLAEYFCHQYYTYPLFTFGSGTKLEMKRTVAAPSVFIFPPSDEQLKSGTASVVCLLNNFYPREAKVQWKVDNALQSGNSQESVTEQDSKDSTYSLSSTLTLSKADYEKHKVYACEVTHQGLSSPVTKSFNRGEC

SEQ ID NO: 212 - protein, 108 aa, Artificial Sequence
  Description of Artificial Sequence: Synthetic polypeptide
DIVMTQSQRFMSTSVGDRVSVTCKASQNVGTNVAWYQQKPGQSPKALIYSASYRYSGVPDRFTGSGSGTDFTLTISNVQSEDLAEYFCHQYYTYPLFTFGSGTKLEMK

SEQ ID NO: 213 - protein, 6 aa, Artificial Sequence
  Description of Artificial Sequence: Synthetic peptide
QNVGTN

SEQ ID NO: 214 - protein, 3 aa, Artificial Sequence
  Description of Artificial Sequence: Synthetic peptide
SAS

SEQ ID NO: 215 - protein, 10 aa, Artificial Sequence
  Description of Artificial Sequence: Synthetic peptide
HQYYTYPLFT

SEQ ID NO: 216 - protein, 714 aa, Artificial Sequence
  Description of Artificial Sequence: Synthetic polypeptide
QVQLVQSGAEVKKPGASVKVSCKASGYTFTGYYMHWVRQAPGQGLEWMGWINPDSGGTNYAQKFQGRVTMTRDTSISTAYMELNRLRSDDTAVYYCARDQPLGYCTNGVCSYFDYWGQGTLVTVSSASTKGPSVFPLAPSSKSTSGGTAALGCLVKDYFPEPVTVSWNSGALTSGVHTFPAVLQSSGLYSLSSVVTVPSSSLGTQTYICNVNHKPSNTKVDKKVEPKSCDKTHTCPPCPAPELLGGPSVFLFPPKPKDTLMISRTPEVTCVVVDVSHEDPEVKFNWYVDGVEVHNAKTKPREEQYNSTYRVVSVLTVLHQDWLNGKEYKCKVSNKALPAPIEKTISKAKGQPREPQVYTLPPSREEMTKNQVSLTCLVKGFYPSDIAVEWESNGQPENNYKTTPPVLDSDGSFFLYSKLTVDKSRWQQGNVFSCSVMHEALHNHYTQKSLSLSPGGGGGSGGGGSQVKLQQSGPELKKPGETVKISCKASGYTFTEFGMNWVKQAPGKGLKWMGWINTKTGEATYVEEFKGRFAFSLETSATTAYLQINNLKNEDTAKYFCARWDFYDYVEAMDYWGQGTTVTVSSGGGGSGGGGSGGGGSGGGGSDIVMTQSQRFMSTSVGDRVSVTCKASQNVGTNVAWYQQKPGQSPKALIYSASYRYSGVPDRFTGSGSGTDFTLTISNVQSEDLAEYFCHQYYTYPLFTFGSGTKLEMK

SEQ ID NO: 217 - protein, 713 aa, Artificial Sequence
  Description of Artificial Sequence: Synthetic polypeptide
QVKLQQSGPELKKPGETVKISCKASGYTFTEFGMNWVKQAPGKGLKWMGWINTKTGEATYVEEFKGRFAFSLETSATTAYLQINNLKNEDTAKYFCARWDFYDYVEAMDYWGQGTTVTVSSASTKGPSVFPLAPSSKSTSGGTAALGCLVKDYFPEPVTVSWNSGALTSGVHTFPAVLQSSGLYSLSSVVTVPSSSLGTQTYICNVNHKPSNTKVDKKVEPKSCDKTHTCPPCPAPELLGGPSVFLFPPKPKDTLMISRTPEVTCVVVDVSHEDPEVKFNWYVDGVEVHNAKTKPREEQYNSTYRVVSVLTVLHQDWLNGKEYKCKVSNKALPAPIEKTISKAKGQPREPQVYTLPPSREEMTKNQVSLTCLVKGFYPSDIAVEWESNGQPENNYKTTPPVLDSDGSFFLYSKLTVDKSRWQQGNVFSCSVMHEALHNHYTQKSLSLSPGGGGGSGGGGSQVQLVQSGAEVKKPGASVKVSCKASGYTFTGYYMHWVRQAPGQGLEWMGWINPDSGGTNYAQKFQGRVTMTRDTSISTAYMELNRLRSDDTAVYYCARDQPLGYCTNGVCSYFDYWGQGTLVTVSSGGGGSGGGGSGGGGSGGGGSDIQMTQSPSSVSASVGDRVTITCRASQGIYSWLAWYQQKPGKAPNLLIYTASTLQSGVPSRFSGSGSGTDFTLTISSLQPEDFATYYCQQANIFPLTFGGGTKVEIK

SEQ ID NO: 218 - protein, 478 aa, Artificial Sequence
  Description of Artificial Sequence: Synthetic polypeptide
DIVMTQSQRFMSTSVGDRVSVTCKASQNVGTNVAWYQQKPGQSPKALIYSASYRYSGVPDRFTGSGSGTDFTLTISNVQSEDLAEYFCHQYYTYPLFTFGSGTKLEMKRTVAAPSVFIFPPSDEQLKSGTASVVCLLNNFYPREAKVQWKVDNALQSGNSQESVTEQDSKDSTYSLSSTLTLSKADYEKHKVYACEVTHQGLSSPVTKSFNRGECGGGGSGGGGSQVQLVQSGAEVKKPGASVKVSCKASGYTFTGYYMHWVRQAPGQGLEWMGWINPDSGGTNYAQKFQGRVTMTRDTSISTAYMELNRLRSDDTAVYYCARDQPLGYCTNGVCSYFDYWGQGTLVTVSSGGGGSGGGGSGGGGSGGGGSDIQMTQSPSSVSASVGDRVTITCRASQGIYSWLAWYQQKPGKAPNLLIYTASTLQSGVPSRFSGSGSGTDFTLTISSLQPEDFATYYCQQANIFPLTFGGGTKVEIK

SEQ ID NO: 219 - protein, 448 aa, Artificial Sequence
  Description of Artificial Sequence: Synthetic polypeptide
QVQLQQPGAELVRPGASVKLSCKASGYTFTSYWINWVKQRPGQGLEWIGNIYPSDSYTNYNQKFKDKATLTVDKSSSTAYMQLSSPTSEDSAVYYCTRSWRGNSFDYWGQGTTLTVSSASTKGPSVFPLAPSSKSTSGGTAALGCLVKDYFPEPVTVSWNSGALTSGVHTFPAVLQSSGLYSLSSVVTVPSSSLGTQTYICNVNHKPSNTKVDKKVEPKSCDKTHTCPPCPAPELLGGPSVFLFPPKPKDTLMISRTPEVTCVVVDVSHEDPEVKFNWYVDGVEVHNAKTKPREEQYNSTYRVVSVLTVLHQDWLNGKEYKCKVSNKALPAPIEKTISKAKGQPREPQVYTLPPSREEMTKNQVSLTCLVKGFYPSDIAVEWESNGQPENNYKTTPPVLDSDGSFFLYSKLTVDKSRWQQGNVFSCSVMHEALHNHYTQKSLSLSPGK

SEQ ID NO: 220 - protein, 118 aa, Artificial Sequence
  Description of Artificial Sequence: Synthetic polypeptide
QVQLQQPGAELVRPGASVKLSCKASGYTFTSYWINWVKQRPGQGLEWIGNIYPSDSYTNYNQKFKDKATLTVDKSSSTAYMQLSSPTSEDSAVYYCTRSWRGNSFDYWGQGTTLTVSS

SEQ ID NO: 221 - protein, 8 aa, Artificial Sequence
  Description of Artificial Sequence: Synthetic peptide
GYTFTSYW

SEQ ID NO: 222 - protein, 8 aa, Artificial Sequence
  Description of Artificial Sequence: Synthetic peptide
IYPSDSYT

SEQ ID NO: 223 - protein, 11 aa, Artificial Sequence
  Description of Artificial Sequence: Synthetic peptide
TRSWRGNSFDY

SEQ ID NO: 224 - protein, 220 aa, Artificial Sequence
  Description of Artificial Sequence: Synthetic polypeptide
DIVMTQSPSSLTVTAGEKVTMSCKSSQSLLNSGNQKNYLTWYQQKPGQPPKLLIYWASTRESGVPDRFTGSGSGTDFTLTISSVQAEDLAVYYCQNDYSYPFTFGSGTKLEIKRTVAAPSVFIFPPSDEQLKSGTASVVCLLNNFYPREAKVQWKVDNALQSGNSQESVTEQDSKDSTYSLSSTLTLSKADYEKHKVYACEVTHQGLSSPVTKSFNRGEC

SEQ ID NO: 225 - protein, 113 aa, Artificial Sequence
  Description of Artificial Sequence: Synthetic polypeptide
DIVMTQSPSSLTVTAGEKVTMSCKSSQSLLNSGNQKNYLTWYQQKPGQPPKLLIYWASTRESGVPDRFTGSGSGTDFTLTISSVQAEDLAVYYCQNDYSYPFTFGSGTKLEIK

SEQ ID NO: 226 - protein, 12 aa, Artificial Sequence
  Description of Artificial Sequence: Synthetic peptide
QSLLNSGNQKNY

SEQ ID NO: 227 - protein, 3 aa, Artificial Sequence
  Description of Artificial Sequence: Synthetic peptide
WAS

SEQ ID NO: 228 - protein, 9 aa, Artificial Sequence
  Description of Artificial Sequence: Synthetic peptide
QNDYSYPFT

SEQ ID NO: 229 - protein, 716 aa, Artificial Sequence
  Description of Artificial Sequence: Synthetic polypeptide
QVQLVQSGAEVKKPGASVKVSCKASGYTFTGYYMHWVRQAPGQGLEWMGWINPDSGGTNYAQKFQGRVTMTRDTSISTAYMELNRLRSDDTAVYYCARDQPLGYCTNGVCSYFDYWGQGTLVTVSSASTKGPSVFPLAPSSKSTSGGTAALGCLVKDYFPEPVTVSWNSGALTSGVHTFPAVLQSSGLYSLSSVVTVPSSSLGTQTYICNVNHKPSNTKVDKKVEPKSCDKTHTCPPCPAPELLGGPSVFLFPPKPKDTLMISRTPEVTCVVVDVSHEDPEVKFNWYVDGVEVHNAKTKPREEQYNSTYRVVSVLTVLHQDWLNGKEYKCKVSNKALPAPIEKTISKAKGQPREPQVYTLPPSREEMTKNQVSLTCLVKGFYPSDIAVEWESNGQPENNYKTTPPVLDSDGSFFLYSKLTVDKSRWQQGNVFSCSVMHEALHNHYTQKSLSLSPGGGGGSGGGGSQVQLQQPGAELVRPGASVKLSCKASGYTFTSYWINWVKQRPGQGLEWIGNIYPSDSYTNYNQKFKDKATLTVDKSSSTAYMQLSSPTSEDSAVYYCTRSWRGNSFDYWGQGTTLTVSSGGGGSGGGGSGGGGSGGGGSDIVMTQSPSSLTVTAGEKVTMSCKSSQSLLNSGNQKNYLTWYQQKPGQPPKLLIYWASTRESGVPDRFTGSGSGTDFTLTISSVQAEDLAVYYCQNDYSYPFTFGSGTKLEIK

SEQ ID NO: 230 - protein, 710 aa, Artificial Sequence
  Description of Artificial Sequence: Synthetic polypeptide
QVQLQQPGAELVRPGASVKLSCKASGYTFTSYWINWVKQRPGQGLEWIGNIYPSDSYTNYNQKFKDKATLTVDKSSSTAYMQLSSPTSEDSAVYYCTRSWRGNSFDYWGQGTTLTVSSASTKGPSVFPLAPSSKSTSGGTAALGCLVKDYFPEPVTVSWNSGALTSGVHTFPAVLQSSGLYSLSSVVTVPSSSLGTQTYICNVNHKPSNTKVDKKVEPKSCDKTHTCPPCPAPELLGGPSVFLFPPKPKDTLMISRTPEVTCVVVDVSHEDPEVKFNWYVDGVEVHNAKTKPREEQYNSTYRVVSVLTVLHQDWLNGKEYKCKVSNKALPAPIEKTISKAKGQPREPQVYTLPPSREEMTKNQVSLTCLVKGFYPSDIAVEWESNGQPENNYKTTPPVLDSDGSFFLYSKLTVDKSRWQQGNVFSCSVMHEALHNHYTQKSLSLSPGGGGGSGGGGSQVQLVQSGAEVKKPGASVKVSCKASGYTFTGYYMHWVRQAPGQGLEWMGWINPDSGGTNYAQKFQGRVTMTRDTSISTAYMELNRLRSDDTAVYYCARDQPLGYCTNGVCSYFDYWGQGTLVTVSSGGGGSGGGGSGGGGSGGGGSDIQMTQSPSSVSASVGDRVTITCRASQGIYSWLAWYQQKPGKAPNLLIYTASTLQSGVPSRFSGSGSGTDFTLTISSLQPEDFATYYCQQANIFPLTFGGGTKVEIK

SEQ ID NO: 231 - protein, 483 aa, Artificial Sequence
  Description of Artificial Sequence: Synthetic polypeptide
DIVMTQSPSSLTVTAGEKVTMSCKSSQSLLNSGNQKNYLTWYQQKPGQPPKLLIYWASTRESGVPDRFTGSGSGTDFTLTISSVQAEDLAVYYCQNDYSYPFTFGSGTKLEIKRTVAAPSVFIFPPSDEQLKSGTASVVCLLNNFYPREAKVQWKVDNALQSGNSQESVTEQDSKDSTYSLSSTLTLSKADYEKHKVYACEVTHQGLSSPVTKSFNRGECGGGGSGGGGSQVQLVQSGAEVKKPGASVKVSCKASGYTFTGYYMHWVRQAPGQGLEWMGWINPDSGGTNYAQKFQGRVTMTRDTSISTAYMELNRLRSDDTAVYYCARDQPLGYCTNGVCSYFDYWGQGTLVTVSSGGGGSGGGGSGGGGSGGGGSDIQMTQSPSSVSASVGDRVTITCRASQGIYSWLAWYQQKPGKAPNLLIYTASTLQSGVPSRFSGSGSGTDFTLTISSLQPEDFATYYCQQANIFPLTFGGGTKVEIK

SEQ ID NO: 232 - protein, 448 aa, Artificial Sequence
  Description of Artificial Sequence: Synthetic polypeptide
QVQLVESGGGVVQPGRSLRLSCAASGFTFSNYGMYWVRQAPGKGLEWVAVIWYDGSNKYYADSVKGRFTISRDNSKNTLYLQMNSLRAEDTAVYYCARDLWGWYFDYWGQGTLVTVSSASTKGPSVFPLAPSSKSTSGGTAALGCLVKDYFPEPVTVSWNSGALTSGVHTFPAVLQSSGLYSLSSVVTVPSSSLGTQTYICNVNHKPSNTKVDKKVEPKSCDKTHTCPPCPAPELLGGPSVFLFPPKPKDTLMISRTPEVTCVVVDVSHEDPEVKFNWYVDGVEVHNAKTKPREEQYNSTYRVVSVLTVLHQDWLNGKEYKCKVSNKALPAPIEKTISKAKGQPREPQVYTLPPSREEMTKNQVSLTCLVKGFYPSDIAVEWESNGQPENNYKTTPPVLDSDGSFFLYSKLTVDKSRWQQGNVFSCSVMHEALHNHYTQKSLSLSPGK

SEQ ID NO: 233 - protein, 118 aa, Artificial Sequence
  Description of Artificial Sequence: Synthetic polypeptide
QVQLVESGGGVVQPGRSLRLSCAASGFTFSNYGMYWVRQAPGKGLEWVAVIWYDGSNKYYADSVKGRFTISRDNSKNTLYLQMNSLRAEDTAVYYCARDLWGWYFDYWGQGTLVTVSS

SEQ ID NO: 234 - protein, 8 aa, Artificial Sequence
  Description of Artificial Sequence: Synthetic peptide
GFTFSNYG

SEQ ID NO: 235 - protein, 8 aa, Artificial Sequence
  Description of Artificial Sequence: Synthetic peptide
IWYDGSNK

SEQ ID NO: 236 - protein, 11 aa, Artificial Sequence
  Description of Artificial Sequence: Synthetic peptide
ARDLWGWYFDY

SEQ ID NO: 237 - protein, 214 aa, Artificial Sequence
  Description of Artificial Sequence: Synthetic polypeptide
EIVLTQSPATLSLSPGERATLSCRASQSVSSYLAWYQQKPGQAPRLLIYDASNRATGIPARFSGSGSGTDFTLTISSLEPEDFAVYYCQQRRNWPLTFGGGTKVEIKRTVAAPSVFIFPPSDEQLKSGTASVVCLLNNFYPREAKVQWKVDNALQSGNSQESVTEQDSKDSTYSLSSTLTLSKADYEKHKVYACEVTHQGLSSPVTKSFNRGEC

SEQ ID NO: 238 - protein, 107 aa, Artificial Sequence
  Description of Artificial Sequence: Synthetic polypeptide
EIVLTQSPATLSLSPGERATLSCRASQSVSSYLAWYQQKPGQAPRLLIYDASNRATGIPARFSGSGSGTDFTLTISSLEPEDFAVYYCQQRRNWPLTFGGGTKVEIK

SEQ ID NO: 239 - protein, 6 aa, Artificial Sequence
  Description of Artificial Sequence: Synthetic peptide
QSVSSY

SEQ ID NO: 240 - protein, 3 aa, Artificial Sequence
  Description of Artificial Sequence: Synthetic peptide
DAS

SEQ ID NO: 241 - protein, 9 aa, Artificial Sequence
  Description of Artificial Sequence: Synthetic peptide
QQRRNWPLT

SEQ ID NO: 242 - protein, 710 aa, Artificial Sequence
  Description of Artificial Sequence: Synthetic polypeptide
QVQLVQSGAEVKKPGASVKVSCKASGYTFTGYYMHWVRQAPGQGLEWMGWINPDSGGTNYAQKFQGRVTMTRDTSISTAYMELNRLRSDDTAVYYCARDQPLGYCTNGVCSYFDYWGQGTLVTVSSASTKGPSVFPLAPSSKSTSGGTAALGCLVKDYFPEPVTVSWNSGALTSGVHTFPAVLQSSGLYSLSSVVTVPSSSLGTQTYICNVNHKPSNTKVDKKVEPKSCDKTHTCPPCPAPELLGGPSVFLFPPKPKDTLMISRTPEVTCVVVDVSHEDPEVKFNWYVDGVEVHNAKTKPREEQYNSTYRVVSVLTVLHQDWLNGKEYKCKVSNKALPAPIEKTISKAKGQPREPQVYTLPPSREEMTKNQVSLTCLVKGFYPSDIAVEWESNGQPENNYKTTPPVLDSDGSFFLYSKLTVDKSRWQQGNVFSCSVMHEALHNHYTQKSLSLSPGGGGGSGGGGSQVQLVESGGGVVQPGRSLRLSCAASGFTFSNYGMYWVRQAPGKGLEWVAVIWYDGSNKYYADSVKGRFTISRDNSKNTLYLQMNSLRAEDTAVYYCARDLWGWYFDYWGQGTLVTVSSGGGGSGGGGSGGGGSGGGGSEIVLTQSPATLSLSPGERATLSCRASQSVSSYLAWYQQKPGQAPRLLIYDASNRATGIPARFSGSGSGTDFTLTISSLEPEDFAVYYCQQRRNWPLTFGGGTKVEIK

SEQ ID NO: 243 - protein, 710 aa, Artificial Sequence
  Description of Artificial Sequence: Synthetic polypeptide
QVQLVESGGGVVQPGRSLRLSCAASGFTFSNYGMYWVRQAPGKGLEWVAVIWYDGSNKYYADSVKGRFTISRDNSKNTLYLQMNSLRAEDTAVYYCARDLWGWYFDYWGQGTLVTVSSASTKGPSVFPLAPSSKSTSGGTAALGCLVKDYFPEPVTVSWNSGALTSGVHTFPAVLQSSGLYSLSSVVTVPSSSLGTQTYICNVNHKPSNTKVDKKVEPKSCDKTHTCPPCPAPELLGGPSVFLFPPKPKDTLMISRTPEVTCVVVDVSHEDPEVKFNWYVDGVEVHNAKTKPREEQYNSTYRVVSVLTVLHQDWLNGKEYKCKVSNKALPAPIEKTISKAKGQPREPQVYTLPPSREEMTKNQVSLTCLVKGFYPSDIAVEWESNGQPENNYKTTPPVLDSDGSFFLYSKLTVDKSRWQQGNVFSCSVMHEALHNHYTQKSLSLSPGGGGGSGGGGSQVQLVQSGAEVKKPGASVKVSCKASGYTFTGYYMHWVRQAPGQGLEWMGWINPDSGGTNYAQKFQGRVTMTRDTSISTAYMELNRLRSDDTAVYYCARDQPLGYCTNGVCSYFDYWGQGTLVTVSSGGGGSGGGGSGGGGSGGGGSDIQMTQSPSSVSASVGDRVTITCRASQGIYSWLAWYQQKPGKAPNLLIYTASTLQSGVPSRFSGSGSGTDFTLTISSLQPEDFATYYCQQANIFPLTFGGGTKVEIK

SEQ ID NO: 244 - protein, 477 aa, Artificial Sequence
  Description of Artificial Sequence: Synthetic polypeptide
EIVLTQSPATLSLSPGERATLSCRASQSVSSYLAWYQQKPGQAPRLLIYDASNRATGIPARFSGSGSGTDFTLTISSLEPEDFAVYYCQQRRNWPLTFGGGTKVEIKRTVAAPSVFIFPPSDEQLKSGTASVVCLLNNFYPREAKVQWKVDNALQSGNSQESVTEQDSKDSTYSLSSTLTLSKADYEKHKVYACEVTHQGLSSPVTKSFNRGECGGGGSGGGGSQVQLVQSGAEVKKPGASVKVSCKASGYTFTGYYMHWVRQAPGQGLEWMGWINPDSGGTNYAQKFQGRVTMTRDTSISTAYMELNRLRSDDTAVYYCARDQPLGYCTNGVCSYFDYWGQGTLVTVSSGGGGSGGGGSGGGGSGGGGSDIQMTQSPSSVSASVGDRVTITCRASQGIYSWLAWYQQKPGKAPNLLIYTASTLQSGVPSRFSGSGSGTDFTLTISSLQPEDFATYYCQQANIFPLTFGGGTKVEIK

SEQ ID NO: 245 - protein, 446 aa, Artificial Sequence
  Description of Artificial Sequence: Synthetic polypeptide
EVQLVQSGAEVKKPGESLRISCKGSGDSFTTYWIGWVRQMPGKGLEWMGIIYPGDSDTIYSPSFQGQVTISADKSISTAYLQWSSLKASDTAMYYCTRGDRGVDYWGQGTLVTVSSASTKGPSVFPLAPSSKSTSGGTAALGCLVKDYFPEPVTVSWNSGALTSGVHTFPAVLQSSGLYSLSSVVTVPSSSLGTQTYICNVNHKPSNTKVDKKVEPKSCDKTHTCPPCPAPELLGGPSVFLFPPKPKDTLMISRTPEVTCVVVDVSHEDPEVKFNWYVDGVEVHNAKTKPREEQYNSTYRVVSVLTVLHQDWLNGKEYKCKVSNKALPAPIEKTISKAKGQPREPQVYTLPPSREEMTKNQVSLTCLVKGFYPSDIAVEWESNGQPENNYKTTPPVLDSDGSFFLYSKLTVDKSRWQQGNVFSCSVMHEALHNHYTQKSLSLSPGK

SEQ ID NO: 246 - protein, 116 aa, Artificial Sequence
  Description of Artificial Sequence: Synthetic polypeptide
EVQLVQSGAEVKKPGESLRISCKGSGDSFTTYWIGWVRQMPGKGLEWMGIIYPGDSDTIYSPSFQGQVTISADKSISTAYLQWSSLKASDTAMYYCTRGDRGVDYWGQGTLVTVSS

SEQ ID NO: 247 - protein, 8 aa, Artificial Sequence
  Description of Artificial Sequence: Synthetic peptide
GDSFTTYW

SEQ ID NO: 248 - protein, 8 aa, Artificial Sequence
  Description of Artificial Sequence: Synthetic peptide
IYPGDSDT

SEQ ID NO: 249 - protein, 9 aa, Artificial Sequence
  Description of Artificial Sequence: Synthetic peptide
TRGDRGVDY

SEQ ID NO: 250 - protein, 214 aa, Artificial Sequence
  Description of Artificial Sequence: Synthetic polypeptide
DIQMTQSPSSLSASVGDRVTITCRASQGISRWLAWYQQKPEKAPKSLIYAASSLQSGVPSRFSGSGSGTDFTLTISGLQPEDFATYYCQQYNSYPRTFGQGTKVEIKRTVAAPSVFIFPPSDEQLKSGTASVVCLLNNFYPREAKVQWKVDNALQSGNSQESVTEQDSKDSTYSLSSTLTLSKADYEKHKVYACEVTHQGLSSPVTKSFNRGEC

SEQ ID NO: 251 - protein, 107 aa, Artificial Sequence
  Description of Artificial Sequence: Synthetic polypeptide
DIQMTQSPSSLSASVGDRVTITCRASQGISRWLAWYQQKPEKAPKSLIYAASSLQSGVPSRFSGSGSGTDFTLTISGLQPEDFATYYCQQYNSYPRTFGQGTKVEIK

SEQ ID NO: 252 - protein, 6 aa, Artificial Sequence
  Description of Artificial Sequence: Synthetic peptide
QGISRW

SEQ ID NO: 253 - protein, 3 aa, Artificial Sequence
  Description of Artificial Sequence: Synthetic peptide
AAS

SEQ ID NO: 254 - protein, 9 aa, Artificial Sequence
  Description of Artificial Sequence: Synthetic peptide
QQYNSYPRT

SEQ ID NO: 255 - protein, 708 aa, Artificial Sequence
  Description of Artificial Sequence: Synthetic polypeptide
QVQLVQSGAEVKKPGASVKVSCKASGYTFTGYYMHWVRQAPGQGLEWMGWINPDSGGTNYAQKFQGRVTMTRDTSISTAYMELNRLRSDDTAVYYCARDQPLGYCTNGVCSYFDYWGQGTLVTVSSASTKGPSVFPLAPSSKSTSGGTAALGCLVKDYFPEPVTVSWNSGALTSGVHTFPAVLQSSGLYSLSSVVTVPSSSLGTQTYICNVNHKPSNTKVDKKVEPKSCDKTHTCPPCPAPELLGGPSVFLFPPKPKDTLMISRTPEVTCVVVDVSHEDPEVKFNWYVDGVEVHNAKTKPREEQYNSTYRVVSVLTVLHQDWLNGKEYKCKVSNKALPAPIEKTISKAKGQPREPQVYTLPPSREEMTKNQVSLTCLVKGFYPSDIAVEWESNGQPENNYKTTPPVLDSDGSFFLYSKLTVDKSRWQQGNVFSCSVMHEALHNHYTQKSLSLSPGGGGGSGGGGSEVQLVQSGAEVKKPGESLRISCKGSGDSFTTYWIGWVRQMPGKGLEWMGIIYPGDSDTIYSPSFQGQVTISADKSISTAYLQWSSLKASDTAMYYCTRGDRGVDYWGQGTLVTVSSGGGGSGGGGSGGGGSGGGGSDIQMTQSPSSLSASVGDRVTITCRASQGISRWLAWYQQKPEKAPKSLIYAASSLQSGVPSRFSGSGSGTDFTLTISGLQPEDFATYYCQQYNSYPRTFGQGTKVEIK

SEQ ID NO: 256 - protein, 708 aa, Artificial Sequence
  Description of Artificial Sequence: Synthetic polypeptide
EVQLVQSGAEVKKPGESLRISCKGSGDSFTTYWIGWVRQMPGKGLEWMGIIYPGDSDTIYSPSFQGQVTISADKSISTAYLQWSSLKASDTAMYYCTRGDRGVDYWGQGTLVTVSSASTKGPSVFPLAPSSKSTSGGTAALGCLVKDYFPEPVTVSWNSGALTSGVHTFPAVLQSSGLYSLSSVVTVPSSSLGTQTYICNVNHKPSNTKVDKKVEPKSCDKTHTCPPCPAPELLGGPSVFLFPPKPKDTLMISRTPEVTCVVVDVSHEDPEVKFNWYVDGVEVHNAKTKPREEQYNSTYRVVSVLTVLHQDWLNGKEYKCKVSNKALPAPIEKTISKAKGQPREPQVYTLPPSREEMTKNQVSLTCLVKGFYPSDIAVEWESNGQPENNYKTTPPVLDSDGSFFLYSKLTVDKSRWQQGNVFSCSVMHEALHNHYTQKSLSLSPGGGGGSGGGGSQVQLVQSGAEVKKPGASVKVSCKASGYTFTGYYMHWVRQAPGQGLEWMGWINPDSGGTNYAQKFQGRVTMTRDTSISTAYMELNRLRSDDTAVYYCARDQPLGYCTNGVCSYFDYWGQGTLVTVSSGGGGSGGGGSGGGGSGGGGSDIQMTQSPSSVSASVGDRVTITCRASQGIYSWLAWYQQKPGKAPNLLIYTASTLQSGVPSRFSGSGSGTDFTLTISSLQPEDFATYYCQQANIFPLTFGGGTKVEIK

SEQ ID NO: 257 - protein, 477 aa, Artificial Sequence
  Description of Artificial Sequence: Synthetic polypeptide
DIQMTQSPSSLSASVGDRVTITCRASQGISRWLAWYQQKPEKAPKSLIYAASSLQSGVPSRFSGSGSGTDFTLTISGLQPEDFATYYCQQYNSYPRTFGQGTKVEIKRTVAAPSVFIFPPSDEQLKSGTASVVCLLNNFYPREAKVQWKVDNALQSGNSQESVTEQDSKDSTYSLSSTLTLSKADYEKHKVYACEVTHQGLSSPVTKSFNRGECGGGGSGGGGSQVQLVQSGAEVKKPGASVKVSCKASGYTFTGYYMHWVRQAPGQGLEWMGWINPDSGGTNYAQKFQGRVTMTRDTSISTAYMELNRLRSDDTAVYYCARDQPLGYCTNGVCSYFDYWGQGTLVTVSSGGGGSGGGGSGGGGSGGGGSDIQMTQSPSSVSASVGDRVTITCRASQGIYSWLAWYQQKPGKAPNLLIYTASTLQSGVPSRFSGSGSGTDFTLTISSLQPEDFATYYCQQANIFPLTFGGGTKVEIK

SEQ ID NO: 258 - protein, 454 aa, Artificial Sequence
  Description of Artificial Sequence: Synthetic polypeptide
QVQLVESGGGVVQSGRSLRLSCAASGFTFRNYGMHWVRQAPGKGLEWVAVIWYDGSDKYYADSVRGRFTISRDNSKNTLYLQMNSLRAEDTAVYYCARDGYDILTGNPRDFDYWGQGTLVTVSSASTKGPSVFPLAPSSKSTSGGTAALGCLVKDYFPEPVTVSWNSGALTSGVHTFPAVLQSSGLYSLSSVVTVPSSSLGTQTYICNVNHKPSNTKVDKKVEPKSCDKTHTCPPCPAPELLGGPSVFLFPPKPKDTLMISRTPEVTCVVVDVSHEDPEVKFNWYVDGVEVHNAKTKPREEQYNSTYRVVSVLTVLHQDWLNGKEYKCKVSNKALPAPIEKTISKAKGQPREPQVYTLPPSREEMTKNQVSLTCLVKGFYPSDIAVEWESNGQPENNYKTTPPVLDSDGSFFLYSKLTVDKSRWQQGNVFSCSVMHEALHNHYTQKSLSLSPGK

SEQ ID NO: 259 - protein, 124 aa, Artificial Sequence
  Description of Artificial Sequence: Synthetic polypeptide
QVQLVESGGGVVQSGRSLRLSCAASGFTFRNYGMHWVRQAPGKGLEWVAVIWYDGSDKYYADSVRGRFTISRDNSKNTLYLQMNSLRAEDTAVYYCARDGYDILTGNPRDFDYWGQGTLVTVSS

SEQ ID NO: 260 - protein, 8 aa, Artificial Sequence
  Description of Artificial Sequence: Synthetic peptide
GFTFRNYG

SEQ ID NO: 261 - protein, 8 aa, Artificial Sequence
  Description of Artificial Sequence: Synthetic peptide
IWYDGSDK

SEQ ID NO: 262 - protein, 17 aa, Artificial Sequence
  Description of Artificial Sequence: Synthetic peptide
ARDGYDILTGNPRDFDY

SEQ ID NO: 263 - protein, 219 aa, Artificial Sequence
  Description of Artificial Sequence: Synthetic polypeptide
DTVMTQTPLSSHVTLGQPASISCRSSQSLVHSDGNTYLSWLQQRPGQPPRLLIYRISRRFSGVPDRFSGSGAGTDFTLEISRVEAEDVGVYYCMQSTHVPRTFGQGTKVEIKRTVAAPSVFIFPPSDEQLKSGTASVVCLLNNFYPREAKVQWKVDNALQSGNSQESVTEQDSKDSTYSLSSTLTLSKADYEKHKVYACEVTHQGLSSPVTKSFNRGEC

SEQ ID NO: 264 - protein, 112 aa, Artificial Sequence
  Description of Artificial Sequence: Synthetic polypeptide
DTVMTQTPLSSHVTLGQPASISCRSSQSLVHSDGNTYLSWLQQRPGQPPRLLIYRISRRFSGVPDRFSGSGAGTDFTLEISRVEAEDVGVYYCMQSTHVPRTFGQGTKVEIK

SEQ ID NO: 265 - protein, 11 aa, Artificial Sequence
  Description of Artificial Sequence: Synthetic peptide
QSLVHSDGNTY

SEQ ID NO: 266 - protein, 3 aa, Artificial Sequence
  Description of Artificial Sequence: Synthetic peptide
RIS

SEQ ID NO: 267 - protein, 9 aa, Artificial Sequence
  Description of Artificial Sequence: Synthetic peptide
MQSTHVPRT

SEQ ID NO: 268 - protein, 721 aa, Artificial Sequence
  Description of Artificial Sequence: Synthetic polypeptide
QVQLVQSGAEVKKPGASVKVSCKASGYTFTGYYMHWVRQAPGQGLEWMGWINPDSGGTNYAQKFQGRVTMTRDTSISTAYMELNRLRSDDTAVYYCARDQPLGYCTNGVCSYFDYWGQGTLVTVSSASTKGPSVFPLAPSSKSTSGGTAALGCLVKDYFPEPVTVSWNSGALTSGVHTFPAVLQSSGLYSLSSVVTVPSSSLGTQTYICNVNHKPSNTKVDKKVEPKSCDKTHTCPPCPAPELLGGPSVFLFPPKPKDTLMISRTPEVTCVVVDVSHEDPEVKFNWYVDGVEVHNAKTKPREEQYNSTYRVVSVLTVLHQDWLNGKEYKCKVSNKALPAPIEKTISKAKGQPREPQVYTLPPSREEMTKNQVSLTCLVKGFYPSDIAVEWESNGQPENNYKTTPPVLDSDGSFFLYSKLTVDKSRWQQGNVFSCSVMHEALHNHYTQKSLSLSPGGGGGSGGGGSQVQLVESGGGVVQSGRSLRLSCAASGFTFRNYGMHWVRQAPGKGLEWVAVIWYDGSDKYYADSVRGRFTISRDNSKNTLYLQMNSLRAEDTAVYYCARDGYDILTGNPRDFDYWGQGTLVTVSSGGGGSGGGGSGGGGSGGGGSDTVMTQTPLSSHVTLGQPASISCRSSQSLVHSDGNTYLSWLQQRPGQPPRLLIYRISRRFSGVPDRFSGSGAGTDFTLEISRVEAEDVGVYYCMQSTHVPRTFGQGTKVEIK

SEQ ID NO: 269 - protein, 716 aa, Artificial Sequence
  Description of Artificial Sequence: Synthetic polypeptide
QVQLVESGGGVVQSGRSLRLSCAASGFTFRNYGMHWVRQAPGKGLEWVAVIWYDGSDKYYADSVRGRFTISRDNSKNTLYLQMNSLRAEDTAVYYCARDGYDILTGNPRDFDYWGQGTLVTVSSASTKGPSVFPLAPSSKSTSGGTAALGCLVKDYFPEPVTVSWNSGALTSGVHTFPAVLQSSGLYSLSSVVTVPSSSLGTQTYICNVNHKPSNTKVDKKVEPKSCDKTHTCPPCPAPELLGGPSVFLFPPKPKDTLMISRTPEVTCVVVDVSHEDPEVKFNWYVDGVEVHNAKTKPREEQYNSTYRVVSVLTVLHQDWLNGKEYKCKVSNKALPAPIEKTISKAKGQPREPQVYTLPPSREEMTKNQVSLTCLVKGFYPSDIAVEWESNGQPENNYKTTPPVLDSDGSFFLYSKLTVDKSRWQQGNVFSCSVMHEALHNHYTQKSLSLSPGGGGGSGGGGSQVQLVQSGAEVKKPGASVKVSCKASGYTFTGYYMHWVRQAPGQGLEWMGWINPDSGGTNYAQKFQGRVTMTRDTSISTAYMELNRLRSDDTAVYYCARDQPLGYCTNGVCSYFDYWGQGTLVTVSSGGGGSGGGGSGGGGSGGGGSDIQMTQSPSSVSASVGDRVTITCRASQGIYSWLAWYQQKPGKAPNLLIYTASTLQSGVPSRFSGSGSGTDFTLTISSLQPEDFATYYCQQANIFPLTFGGGTKVEIK

SEQ ID NO: 270 - protein, 482 aa, Artificial Sequence
  Description of Artificial Sequence: Synthetic polypeptide
DTVMTQTPLSSHVTLGQPASISCRSSQSLVHSDGNTYLSWLQQRPGQPPRLLIYRISRRFSGVPDRFSGSGAGTDFTLEISRVEAEDVGVYYCMQSTHVPRTFGQGTKVEIKRTVAAPSVFIFPPSDEQLKSGTASVVCLLNNFYPREAKVQWKVDNALQSGNSQESVTEQDSKDSTYSLSSTLTLSKADYEKHKVYACEVTHQGLSSPVTKSFNRGECGGGGSGGGGSQVQLVQSGAEVKKPGASVKVSCKASGYTFTGYYMHWVRQAPGQGLEWMGWINPDSGGTNYAQKFQGRVTMTRDTSISTAYMELNRLRSDDTAVYYCARDQPLGYCTNGVCSYFDYWGQGTLVTVSSGGGGSGGGGSGGGGSGGGGSDIQMTQSPSSVSASVGDRVTITCRASQGIYSWLAWYQQKPGKAPNLLIYTASTLQSGVPSRFSGSGSGTDFTLTISSLQPEDFATYYCQQANIFPLTFGGGTKVEIK

SEQ ID NO: 271 - protein, 446 aa, Artificial Sequence
  Description of Artificial Sequence: Synthetic polypeptide
EVQLQESGPGLVKPSQTLSLTCTVSGYSISRDFAWNWIRQPPGKGLEWMGYISYNGNTRYQPSLKSRITISRDTSKNQFFLKLNSVTAADTATYYCVTASRGFPYWGQGTLVTVSSASTKGPSVFPLAPSSKSTSGGTAALGCLVKDYFPEPVTVSWNSGALTSGVHTFPAVLQSSGLYSLSSVVTVPSSSLGTQTYICNVNHKPSNTKVDKKVEPKSCDKTHTCPPCPAPELLGGPSVFLFPPKPKDTLMISRTPEVTCVVVDVSHEDPEVKFNWYVDGVEVHNAKTKPREEQYNSTYRVVSVLTVLHQDWLNGKEYKCKVSNKALPAPIEKTISKAKGQPREPQVYTLPPSREEMTKNQVSLTCLVKGFYPSDIAVEWESNGQPENNYKTTPPVLDSDGSFFLYSKLTVDKSRWQQGNVFSCSVMHEALHNHYTQKSLSLSPGK

SEQ ID NO: 272 - protein, 116 aa, Artificial Sequence
  Description of Artificial Sequence: Synthetic polypeptide
EVQLQESGPGLVKPSQTLSLTCTVSGYSISRDFAWNWIRQPPGKGLEWMGYISYNGNTRYQPSLKSRITISRDTSKNQFFLKLNSVTAADTATYYCVTASRGFPYWGQGTLVTVSS

SEQ ID NO: 273 - protein, 9 aa, Artificial Sequence
  Description of Artificial Sequence: Synthetic peptide
GYSISRDFA

SEQ ID NO: 274 - protein, 7 aa, Artificial Sequence
  Description of Artificial Sequence: Synthetic peptide
ISYNGNT

SEQ ID NO: 275 - protein, 9 aa, Artificial Sequence
  Description of Artificial Sequence: Synthetic peptide
VTASRGFPY

SEQ ID NO: 276 - protein, 214 aa, Artificial Sequence
  Description of Artificial Sequence: Synthetic polypeptide
DIQMTQSPSSMSVSVGDRVTITCHSSQDINSNIGWLQQKPGKSFKGLIYHGTNLDDGVPSRFSGSGSGTDYTLTISSLQPEDFATYYCVQYAQFPWTFGGGTKLEIKRTVAAPSVFIFPPSDEQLKSGTASVVCLLNNFYPREAKVQWKVDNALQSGNSQESVTEQDSKDSTYSLSSTLTLSKADYEKHKVYACEVTHQGLSSPVTKSFNRGEC

SEQ ID NO: 277 - protein, 107 aa, Artificial Sequence
  Description of Artificial Sequence: Synthetic polypeptide
DIQMTQSPSSMSVSVGDRVTITCHSSQDINSNIGWLQQKPGKSFKGLIYHGTNLDDGVPSRFSGSGSGTDYTLTISSLQPEDFATYYCVQYAQFPWTFGGGTKLEIK

SEQ ID NO: 278 - protein, 6 aa, Artificial Sequence
  Description of Artificial Sequence: Synthetic peptide
QDINSN

SEQ ID NO: 279 - protein, 3 aa, Artificial Sequence
  Description of Artificial Sequence: Synthetic peptide
HGT

SEQ ID NO: 280 - protein, 9 aa, Artificial Sequence
  Description of Artificial Sequence: Synthetic peptide
VQYAQFPWT

SEQ ID NO: 281 - protein, 708 aa, Artificial Sequence
  Description of Artificial Sequence: Synthetic polypeptide
QVQLVQSGAEVKKPGASVKVSCKASGYTFTGYYMHWVRQAPGQGLEWMGWINPDSGGTNYAQKFQGRVTMTRDTSISTAYMELNRLRSDDTAVYYCARDQPLGYCTNGVCSYFDYWGQGTLVTVSSASTKGPSVFPLAPSSKSTSGGTAALGCLVKDYFPEPVTVSWNSGALTSGVHTFPAVLQSSGLYSLSSVVTVPSSSLGTQTYICNVNHKPSNTKVDKKVEPKSCDKTHTCPPCPAPELLGGPSVFLFPPKPKDTLMISRTPEVTCVVVDVSHEDPEVKFNWYVDGVEVHNAKTKPREEQYNSTYRVVSVLTVLHQDWLNGKEYKCKVSNKALPAPIEKTISKAKGQPREPQVYTLPPSREEMTKNQVSLTCLVKGFYPSDIAVEWESNGQPENNYKTTPPVLDSDGSFFLYSKLTVDKSRWQQGNVFSCSVMHEALHNHYTQKSLSLSPGGGGGSGGGGSEVQLQESGPGLVKPSQTLSLTCTVSGYSISRDFAWNWIRQPPGKGLEWMGYISYNGNTRYQPSLKSRITISRDTSKNQFFLKLNSVTAADTATYYCVTASRGFPYWGQGTLVTVSSGGGGSGGGGSGGGGSGGGGSDIQMTQSPSSMSVSVGDRVTITCHSSQDINSNIGWLQQKPGKSFKGLIYHGTNLDDGVPSRFSGSGSGTDYTLTISSLQPEDFATYYCVQYAQFPWTFGGGTKLEIK

SEQ ID NO: 282 - protein, 708 aa, Artificial Sequence
  Description of Artificial Sequence: Synthetic polypeptide
EVQLQESGPGLVKPSQTLSLTCTVSGYSISRDFAWNWIRQPPGKGLEWMGYISYNGNTRYQPSLKSRITISRDTSKNQFFLKLNSVTAADTATYYCVTASRGFPYWGQGTLVTVSSASTKGPSVFPLAPSSKSTSGGTAALGCLVKDYFPEPVTVSWNSGALTSGVHTFPAVLQSSGLYSLSSVVTVPSSSLGTQTYICNVNHKPSNTKVDKKVEPKSCDKTHTCPPCPAPELLGGPSVFLFPPKPKDTLMISRTPEVTCVVVDVSHEDPEVKFNWYVDGVEVHNAKTKPREEQYNSTYRVVSVLTVLHQDWLNGKEYKCKVSNKALPAPIEKTISKAKGQPREPQVYTLPPSREEMTKNQVSLTCLVKGFYPSDIAVEWESNGQPENNYKTTPPVLDSDGSFFLYSKLTVDKSRWQQGNVFSCSVMHEALHNHYTQKSLSLSPGGGGGSGGGGSQVQLVQSGAEVKKPGASVKVSCKASGYTFTGYYMHWVRQAPGQGLEWMGWINPDSGGTNYAQKFQGRVTMTRDTSISTAYMELNRLRSDDTAVYYCARDQPLGYCTNGVCSYFDYWGQGTLVTVSSGGGGSGGGGSGGGGSGGGGSDIQMTQSPSSVSASVGDRVTITCRASQGIYSWLAWYQQKPGKAPNLLIYTASTLQSGVPSRFSGSGSGTDFTLTISSLQPEDFATYYCQQANIFPLTFGGGTKVEIK

SEQ ID NO: 283 - protein, 477 aa, Artificial Sequence
  Description of Artificial Sequence: Synthetic polypeptide
DIQMTQSPSSMSVSVGDRVTITCHSSQDINSNIGWLQQKPGKSFKGLIYHGTNLDDGVPSRFSGSGSGTDYTLTISSLQPEDFATYYCVQYAQFPWTFGGGTKLEIKRTVAAPSVFIFPPSDEQLKSGTASVVCLLNNFYPREAKVQWKVDNALQSGNSQESVTEQDSKDSTYSLSSTLTLSKADYEKHKVYACEVTHQGLSSPVTKSFNRGECGGGGSGGGGSQVQLVQSGAEVKKPGASVKVSCKASGYTFTGYYMHWVRQAPGQGLEWMGWINPDSGGTNYAQKFQGRVTMTRDTSISTAYMELNRLRSDDTAVYYCARDQPLGYCTNGVCSYFDYWGQGTLVTVSSGGGGSGGGGSGGGGSGGGGSDIQMTQSPSSVSASVGDRVTITCRASQGIYSWLAWYQQKPGKAPNLLIYTASTLQSGVPSRFSGSGSGTDFTLTISSLQPEDFATYYCQQANIFPLTFGGGTKVEIK

SEQ ID NO: 284 - protein, 454 aa, Artificial Sequence
  Description of Artificial Sequence: Synthetic polypeptide
QVQLVQSGAEVKKPGASVKVSCKTSRYTFTEYTIHWVRQAPGQRLEWIGGINPNNGIPNYNQKFKGRVTITVDTSASTAYMELSSLRSEDTAVYYCARRRIAYGYDEGHAMDYWGQGTLVTVSSASTKGPSVFPLAPSSKSTSGGTAALGCLVKDYFPEPVTVSWNSGALTSGVHTFPAVLQSSGLYSLSSVVTVPSSSLGTQTYICNVNHKPSNTKVDKKVEPKSCDKTHTCPPCPAPELLGGPSVFLFPPKPKDTLMISRTPEVTCVVVDVSHEDPEVKFNWYVDGVEVHNAKTKPREEQYNSTYRVVSVLTVLHQDWLNGKEYKCKVSNKALPAPIEKTISKAKGQPREPQVYTLPPSREEMTKNQVSLTCLVKGFYPSDIAVEWESNGQPENNYKTTPPVLDSDGSFFLYSKLTVDKSRWQQGNVFSCSVMHEALHNHYTQKSLSLSPGK

SEQ ID NO: 285 - protein, 124 aa, Artificial Sequence
  Description of Artificial Sequence: Synthetic polypeptide
QVQLVQSGAEVKKPGASVKVSCKTSRYTFTEYTIHWVRQAPGQRLEWIGGINPNNGIPNYNQKFKGRVTITVDTSASTAYMELSSLRSEDTAVYYCARRRIAYGYDEGHAMDYWGQGTLVTVSS

SEQ ID NO: 286 - protein, 8 aa, Artificial Sequence
  Description of Artificial Sequence: Synthetic peptide
RYTFTEYT

SEQ ID NO: 287 - protein, 8 aa, Artificial Sequence
  Description of Artificial Sequence: Synthetic peptide
INPNNGIP

SEQ ID NO: 288 - protein, 17 aa, Artificial Sequence
  Description of Artificial Sequence: Synthetic peptide
ARRRIAYGYDEGHAMDY

SEQ ID NO: 289 - protein, 220 aa, Artificial Sequence
  Description of Artificial Sequence: Synthetic polypeptide
DIVMTQSPDSLAVSLGERATINCKSSQSLLYSRNQKNYLAWYQQKPGQPPKLLIFWASTRESGVPDRFSGSGFGTDFTLTISSLQAEDVAVYYCQQYFSYPLTFGQGTKVEIKRTVAAPSVFIFPPSDEQLKSGTASVVCLLNNFYPREAKVQWKVDNALQSGNSQESVTEQDSKDSTYSLSSTLTLSKADYEKHKVYACEVTHQGLSSPVTKSFNRGEC

SEQ ID NO: 290 - protein, 113 aa, Artificial Sequence
  Description of Artificial Sequence: Synthetic polypeptide
DIVMTQSPDSLAVSLGERATINCKSSQSLLYSRNQKNYLAWYQQKPGQPPKLLIFWASTRESGVPDRFSGSGFGTDFTLTISSLQAEDVAVYYCQQYFSYPLTFGQGTKVEIK

SEQ ID NO: 291 - protein, 12 aa, Artificial Sequence
  Description of Artificial Sequence: Synthetic peptide
QSLLYSRNQKNY

SEQ ID NO: 292 - protein, 3 aa, Artificial Sequence
  Description of Artificial Sequence: Synthetic peptide
WAS

SEQ ID NO: 293 - protein, 9 aa, Artificial Sequence
  Description of Artificial Sequence: Synthetic peptide
QQYFSYPLT

SEQ ID NO: 294 - protein, 722 aa, Artificial Sequence
  Description of Artificial Sequence: Synthetic polypeptide
QVQLVQSGAEVKKPGASVKVSCKASGYTFTGYYMHWVRQAPGQGLEWMGWINPDSGGTNYAQKFQGRVTMTRDTSISTAYMELNRLRSDDTAVYYCARDQPLGYCTNGVCSYFDYWGQGTLVTVSSASTKGPSVFPLAPSSKSTSGGTAALGCLVKDYFPEPVTVSWNSGALTSGVHTFPAVLQSSGLYSLSSVVTVPSSSLGTQTYICNVNHKPSNTKVDKKVEPKSCDKTHTCPPCPAPELLGGPSVFLFPPKPKDTLMISRTPEVTCVVVDVSHEDPEVKFNWYVDGVEVHNAKTKPREEQYNSTYRVVSVLTVLHQDWLNGKEYKCKVSNKALPAPIEKTISKAKGQPREPQVYTLPPSREEMTKNQVSLTCLVKGFYPSDIAVEWESNGQPENNYKTTPPVLDSDGSFFLYSKLTVDKSRWQQGNVFSCSVMHEALHNHYTQKSLSLSPGGGGGSGGGGSQVQLVQSGAEVKKPGASVKVSCKTSRYTFTEYTIHWVRQAPGQRLEWIGGINPNNGIPNYNQKFKGRVTITVDTSASTAYMELSSLRSEDTAVYYCARRRIAYGYDEGHAMDYWGQGTLVTVSSGGGGSGGGGSGGGGSGGGGSDIVMTQSPDSLAVSLGERATINCKSSQSLLYSRNQKNYLAWYQQKPGQPPKLLIFWASTRESGVPDRFSGSGFGTDFTLTISSLQAEDVAVYYCQQYFSYPLTFGQGTKVEIK

SEQ ID NO: 295 - protein, 716 aa, Artificial Sequence
  Description of Artificial Sequence: Synthetic polypeptide
QVQLVQSGAEVKKPGASVKVSCKTSRYTFTEYTIHWVRQAPGQRLEWIGGINPNNGIPNYNQKFKGRVTITVDTSASTAYMELSSLRSEDTAVYYCARRRIAYGYDEGHAMDYWGQGTLVTVSSASTKGPSVFPLAPSSKSTSGGTAALGCLVKDYFPEPVTVSWNSGALTSGVHTFPAVLQSSGLYSLSSVVTVPSSSLGTQTYICNVNHKPSNTKVDKKVEPKSCDKTHTCPPCPAPELLGGPSVFLFPPKPKDTLMISRTPEVTCVVVDVSHEDPEVKFNWYVDGVEVHNAKTKPREEQYNSTYRVVSVLTVLHQDWLNGKEYKCKVSNKALPAPIEKTISKAKGQPREPQVYTLPPSREEMTKNQVSLTCLVKGFYPSDIAVEWESNGQPENNYKTTPPVLDSDGSFFLYSKLTVDKSRWQQGNVFSCSVMHEALHNHYTQKSLSLSPGGGGGSGGGGSQVQLVQSGAEVKKPGASVKVSCKASGYTFTGYYMHWVRQAPGQGLEWMGWINPDSGGTNYAQKFQGRVTMTRDTSISTAYMELNRLRSDDTAVYYCARDQPLGYCTNGVCSYFDYWGQGTLVTVSSGGGGSGGGGSGGGGSGGGGSDIQMTQSPSSVSASVGDRVTITCRASQGIYSWLAWYQQKPGKAPNLLIYTASTLQSGVPSRFSGSGSGTDFTLTISSLQPEDFATYYCQQANIFPLTFGGGTKVEIK

SEQ ID NO: 296 - protein, 483 aa, Artificial Sequence
  Description of Artificial Sequence: Synthetic polypeptide
DIVMTQSPDSLAVSLGERATINCKSSQSLLYSRNQKNYLAWYQQKPGQPPKLLIFWASTRESGVPDRFSGSGFGTDFTLTISSLQAEDVAVYYCQQYFSYPLTFGQGTKVEIKRTVAAPSVFIFPPSDEQLKSGTASVVCLLNNFYPREAKVQWKVDNALQSGNSQESVTEQDSKDSTYSLSSTLTLSKADYEKHKVYACEVTHQGLSSPVTKSFNRGECGGGGSGGGGSQVQLVQSGAEVKKPGASVKVSCKASGYTFTGYYMHWVRQAPGQGLEWMGWINPDSGGTNYAQKFQGRVTMTRDTSISTAYMELNRLRSDDTAVYYCARDQPLGYCTNGVCSYFDYWGQGTLVTVSSGGGGSGGGGSGGGGSGGGGSDIQMTQSPSSVSASVGDRVTITCRASQGIYSWLAWYQQKPGKAPNLLIYTASTLQSGVPSRFSGSGSGTDFTLTISSLQPEDFATYYCQQANIFPLTFGGGTKVEIK

SEQ ID NO: 297 - protein, 449 aa, Artificial Sequence
  Description of Artificial Sequence: Synthetic polypeptide
QVQLVQSGAEVKKPGASVKVSCKASGYTFIDYSMHWVRQAPGQGLEWMGWINTYTGEPTYSDDFKGRVTITADTSTSTAYLELSSLRSEDTAVYYCATYYRYERDFDYWGQGTLVTVSSASTKGPSVFPLAPSSKSTSGGTAALGCLVKDYFPEPVTVSWNSGALTSGVHTFPAVLQSSGLYSLSSVVTVPSSSLGTQTYICNVNHKPSNTKVDKKVEPKSCDKTHTCPPCPAPELLGGPSVFLFPPKPKDTLMISRTPEVTCVVVDVSHEDPEVKFNWYVDGVEVHNAKTKPREEQYNSTYRVVSVLTVLHQDWLNGKEYKCKVSNKALPAPIEKTISKAKGQPREPQVYTLPPSREEMTKNQVSLTCLVKGFYPSDIAVEWESNGQPENNYKTTPPVLDSDGSFFLYSKLTVDKSRWQQGNVFSCSVMHEALHNHYTQKSLSLSPGK

SEQ ID NO: 298 - protein, 119 aa, Artificial Sequence
  Description of Artificial Sequence: Synthetic polypeptide
QVQLVQSGAEVKKPGASVKVSCKASGYTFIDYSMHWVRQAPGQGLEWMGWINTYTGEPTYSDDFKGRVTITADTSTSTAYLELSSLRSEDTAVYYCATYYRYERDFDYWGQGTLVTVSS

SEQ ID NO: 299 - protein, 8 aa, Artificial Sequence
  Description of Artificial Sequence: Synthetic peptide
GYTFIDYS

SEQ ID NO: 300 - protein, 8 aa, Artificial Sequence
  Description of Artificial Sequence: Synthetic peptide
INTYTGEP

SEQ ID NO: 301 - protein, 12 aa, Artificial Sequence
  Description of Artificial Sequence: Synthetic peptide
ATYYRYERDFDY

SEQ ID NO: 302 - protein, 219 aa, Artificial Sequence
  Description of Artificial Sequence: Synthetic polypeptide
DIVMTQSPLSLPVTPGEPASISCRSSQSIVHSSGITYLEWYLQKPGQSPQLLIYKVSNRFSGVPDRFSGSGSGTDFTLKISRVEAEDVGVYYCFQGSHVPYTFGQGTKVEIKRTVAAPSVFIFPPSDEQLKSGTASVVCLLNNFYPREAKVQWKVDNALQSGNSQESVTEQDSKDSTYSLSSTLTLSKADYEKHKVYACEVTHQGLSSPVTKSFNRGEC

SEQ ID NO: 303 - protein, 112 aa, Artificial Sequence
  Description of Artificial Sequence: Synthetic polypeptide
DIVMTQSPLSLPVTPGEPASISCRSSQSIVHSSGITYLEWYLQKPGQSPQLLIYKVSNRFSGVPDRFSGSGSGTDFTLKISRVEAEDVGVYYCFQGSHVPYTFGQGTKVEIK

SEQ ID NO: 304 - protein, 11 aa, Artificial Sequence
  Description of Artificial Sequence: Synthetic peptide
QSIVHSSGITY

SEQ ID NO: 305 - protein, 3 aa, Artificial Sequence
  Description of Artificial Sequence: Synthetic peptide
KVS

SEQ ID NO: 306 - protein, 9 aa, Artificial Sequence
  Description of Artificial Sequence: Synthetic peptide
FQGSHVPYT

SEQ ID NO: 307 - protein, 716 aa, Artificial Sequence
  Description of Artificial Sequence: Synthetic polypeptide
QVQLVQSGAEVKKPGASVKVSCKASGYTFTGYYMHWVRQAPGQGLEWMGWINPDSGGTNYAQKFQGRVTMTRDTSISTAYMELNRLRSDDTAVYYCARDQPLGYCTNGVCSYFDYWGQGTLVTVSSASTKGPSVFPLAPSSKSTSGGTAALGCLVKDYFPEPVTVSWNSGALTSGVHTFPAVLQSSGLYSLSSVVTVPSSSLGTQTYICNVNHKPSNTKVDKKVEPKSCDKTHTCPPCPAPELLGGPSVFLFPPKPKDTLMISRTPEVTCVVVDVSHEDPEVKFNWYVDGVEVHNAKTKPREEQYNSTYRVVSVLTVLHQDWLNGKEYKCKVSNKALPAPIEKTISKAKGQPREPQVYTLPPSREEMTKNQVSLTCLVKGFYPSDIAVEWESNGQPENNYKTTPPVLDSDGSFFLYSKLTVDKSRWQQGNVFSCSVMHEALHNHYTQKSLSLSPGGGGGSGGGGSQVQLVQSGAEVKKPGASVKVSCKASGYTFIDYSMHWVRQAPGQGLEWMGWINTYTGEPTYSDDFKGRVTITADTSTSTAYLELSSLRSEDTAVYYCATYYRYERDFDYWGQGTLVTVSSGGGGSGGGGSGGGGSGGGGSDIVMTQSPLSLPVTPGEPASISCRSSQSIVHSSGITYLEWYLQKPGQSPQLLIYKVSNRFSGVPDRFSGSGSGTDFTLKISRVEAEDVGVYYCFQGSHVPYTFGQGTKVEIK

SEQ ID NO: 308 - protein, 711 aa, Artificial Sequence
  Description of Artificial Sequence: Synthetic polypeptide
QVQLVQSGAEVKKPGASVKVSCKASGYTFIDYSMHWVRQAPGQGLEWMGWINTYTGEPTYSDDFKGRVTITADTSTSTAYLELSSLRSEDTAVYYCATYYRYERDFDYWGQGTLVTVSSASTKGPSVFPLAPSSKSTSGGTAALGCLVKDYFPEPVTVSWNSGALTSGVHTFPAVLQSSGLYSLSSVVTVPSSSLGTQTYICNVNHKPSNTKVDKKVEPKSCDKTHTCPPCPAPELLGGPSVFLFPPKPKDTLMISRTPEVTCVVVDVSHEDPEVKFNWYVDGVEVHNAKTKPREEQYNSTYRVVSVLTVLHQDWLNGKEYKCKVSNKALPAPIEKTISKAKGQPREPQVYTLPPSREEMTKNQVSLTCLVKGFYPSDIAVEWESNGQPENNYKTTPPVLDSDGSFFLYSKLTVDKSRWQQGNVFSCSVMHEALHNHYTQKSLSLSPGGGGGSGGGGSQVQLVQSGAEVKKPGASVKVSCKASGYTFTGYYMHWVRQAPGQGLEWMGWINPDSGGTNYAQKFQGRVTMTRDTSISTAYMELNRLRSDDTAVYYCARDQPLGYCTNGVCSYFDYWGQGTLVTVSSGGGGSGGGGSGGGGSGGGGSDIQMTQSPSSVSASVGDRVTITCRASQGIYSWLAWYQQKPGKAPNLLIYTASTLQSGVPSRFSGSGSGTDFTLTISSLQPEDFATYYCQQANIFPLTFGGGTKVEIK

SEQ ID NO: 309 - protein, 482 aa, Artificial Sequence
  Description of Artificial Sequence: Synthetic polypeptide
DIVMTQSPLSLPVTPGEPASISCRSSQSIVHSSGITYLEWYLQKPGQSPQLLIYKVSNRFSGVPDRFSGSGSGTDFTLKISRVEAEDVGVYYCFQGSHVPYTFGQGTKVEIKRTVAAPSVFIFPPSDEQLKSGTASVVCLLNNFYPREAKVQWKVDNALQSGNSQESVTEQDSKDSTYSLSSTLTLSKADYEKHKVYACEVTHQGLSSPVTKSFNRGECGGGGSGGGGSQVQLVQSGAEVKKPGASVKVSCKASGYTFTGYYMHWVRQAPGQGLEWMGWINPDSGGTNYAQKFQGRVTMTRDTSISTAYMELNRLRSDDTAVYYCARDQPLGYCTNGVCSYFDYWGQGTLVTVSSGGGGSGGGGSGGGGSGGGGSDIQMTQSPSSVSASVGDRVTITCRASQGIYSWLAWYQQKPGKAPNLLIYTASTLQSGVPSRFSGSGSGTDFTLTISSLQPEDFATYYCQQANIFPLTFGGGTKVEIK

SEQ ID NO: 310 - protein, 449 aa, Artificial Sequence
  Description of Artificial Sequence: Synthetic polypeptide
QIQLVQSGAEVKKPGASVKVSCKASGYTFIDYSMHWVRQAPGQGLKWMGWINTYTGEPTYSDDFKGRFAFSLDTSTSTAYLELSSLRSEDTAVYYCATYYRYERDFDYWGQGTLVTVSSASTKGPSVFPLAPSSKSTSGGTAALGCLVKDYFPEPVTVSWNSGALTSGVHTFPAVLQSSGLYSLSSVVTVPSSSLGTQTYICNVNHKPSNTKVDKKVEPKSCDKTHTCPPCPAPELLGGPSVFLFPPKPKDTLMISRTPEVTCVVVDVSHEDPEVKFNWYVDGVEVHNAKTKPREEQYNSTYRVVSVLTVLHQDWLNGKEYKCKVSNKALPAPIEKTISKAKGQPREPQVYTLPPSREEMTKNQVSLTCLVKGFYPSDIAVEWESNGQPENNYKTTPPVLDSDGSFFLYSKLTVDKSRWQQGNVFSCSVMHEALHNHYTQKSLSLSPGK

SEQ ID NO: 311 - protein, 119 aa, Artificial Sequence
  Description of Artificial Sequence: Synthetic polypeptide
QIQLVQSGAEVKKPGASVKVSCKASGYTFIDYSMHWVRQAPGQGLKWMGWINTYTGEPTYSDDFKGRFAFSLDTSTSTAYLELSSLRSEDTAVYYCATYYRYERDFDYWGQGTLVTVSS

SEQ ID NO: 312 - protein, 8 aa, Artificial Sequence
  Description of Artificial Sequence: Synthetic peptide
GYTFIDYS

SEQ ID NO: 313 - protein, 8 aa, Artificial Sequence
  Description of Artificial Sequence: Synthetic peptide
INTYTGEP

SEQ ID NO: 314 - protein, 12 aa, Artificial Sequence
  Description of Artificial Sequence: Synthetic peptide
ATYYRYERDFDY

SEQ ID NO: 315 - protein, 219 aa, Artificial Sequence
  Description of Artificial Sequence: Synthetic polypeptide
DVLMTQSPLSLPVTPGEPASISCRSSQSIVHSSGITYLEWYLQKPGQSPQLLIYKVSNRFSGVPDRFSGSGSGTDFTLKISRVEAEDVGVYYCFQGSHVPYTFGQGTKVEIKRTVAAPSVFIFPPSDEQLKSGTASVVCLLNNFYPREAKVQWKVDNALQSGNSQESVTEQDSKDSTYSLSSTLTLSKADYEKHKVYACEVTHQGLSSPVTKSFNRGEC

SEQ ID NO: 316 - protein, 112 aa, Artificial Sequence
  Description of Artificial Sequence: Synthetic polypeptide
DVLMTQSPLSLPVTPGEPASISCRSSQSIVHSSGITYLEWYLQKPGQSPQLLIYKVSNRFSGVPDRFSGSGSGTDFTLKISRVEAEDVGVYYCFQGSHVPYTFGQGTKVEIK

SEQ ID NO: 317 - protein, 11 aa, Artificial Sequence
  Description of Artificial Sequence: Synthetic peptide
QSIVHSSGITY

SEQ ID NO: 318 - protein, 3 aa, Artificial Sequence
  Description of Artificial Sequence: Synthetic peptide
KVS

SEQ ID NO: 319 - protein, 9 aa, Artificial Sequence
  Description of Artificial Sequence: Synthetic peptide
FQGSHVPYT

SEQ ID NO: 320 - protein, 715 aa, Artificial Sequence
  Description of Artificial Sequence: Synthetic polypeptide
QVQLVQSGAEVKKPGASVKVSCKASGYTFTGYYMHWVRQAPGQGLEWMGWINPDSGGTNYAQKFQGRVTMTRDTSISTAYMELNRLRSDDTAVYYCARDQPLGYCTNGVCSYFDYWGQGTLVTVSSASTKGPSVFPLAPSSKSTSGGTAALGCLVKDYFPEPVTVSWNSGALTSGVHTFPAVLQSSGLYSLSSVVTVPSSSLGTQTYICNVNHKPSNTKVDKKVEPKSCDKTHTCPPCPAPELLGGPSVFLFPPKPKDTLMISRTPEVTCVVVDVSHEDPEVKFNWYVDGVEVHNAKTKPREEQYNSTYRVVSVLTVLHQDWLNGKEYKCKVSNKALPAPIEKTISKAKGQPREPQVYTLPPSREEMTKNQVSLTCLVKGFYPSDIAVEWESNGQPENNYKTTPPVLDSDGSFFLYSKLTVDKSRWQQGNVFSCSVMHEALHNHYTQKSLSLSPGGGGGSGGGGSQIQLVQSGAEVKKPGASVKVSCKASGYTFIDYSMHWVRQAPGQGLKWMGWINTYTGEPTYSDDFKGRFAFSLDTSTSTAYLELSSLRSEDTAVYYCATYYRYERDFDYWGQGTLVTVSSGGGGSGGGGSGGGSGGGGSDVLMTQSPLSLPVTPGEPASISCRSSQSIVHSSGITYLEWYLQKPGQSPQLLIYKVSNRFSGVPDRFSGSGSGTDFTLKISRVEAEDVGVYYCFQGSHVPYTFGQGTKVEIK

SEQ ID NO: 321 - protein, 711 aa, Artificial Sequence
  Description of Artificial Sequence: Synthetic polypeptide
QIQLVQSGAEVKKPGASVKVSCKASGYTFIDYSMHWVRQAPGQGLKWMGWINTYTGEPTYSDDFKGRFAFSLDTSTSTAYLELSSLRSEDTAVYYCATYYRYERDFDYWGQGTLVTVSSASTKGPSVFPLAPSSKSTSGGTAALGCLVKDYFPEPVTVSWNSGALTSGVHTFPAVLQSSGLYSLSSVVTVPSSSLGTQTYICNVNHKPSNTKVDKKVEPKSCDKTHTCPPCPAPELLGGPSVFLFPPKPKDTLMISRTPEVTCVVVDVSHEDPEVKFNWYVDGVEVHNAKTKPREEQYNSTYRVVSVLTVLHQDWLNGKEYKCKVSNKALPAPIEKTISKAKGQPREPQVYTLPPSREEMTKNQVSLTCLVKGFYPSDIAVEWESNGQPENNYKTTPPVLDSDGSFFLYSKLTVDKSRWQQGNVFSCSVMHEALHNHYTQKSLSLSPGGGGGSGGGGSQVQLVQSGAEVKKPGASVKVSCKASGYTFTGYYMHWVRQAPGQGLEWMGWINPDSGGTNYAQKFQGRVTMTRDTSISTAYMELNRLRSDDTAVYYCARDQPLGYCTNGVCSYFDYWGQGTLVTVSSGGGGSGGGGSGGGGSGGGGSDIQMTQSPSSVSASVGDRVTITCRASQGIYSWLAWYQQKPGKAPNLLIYTASTLQSGVPSRFSGSGSGTDFTLTISSLQPEDFATYYCQQANIFPLTFGGGTKVEIK

SEQ ID NO: 322 - protein, 482 aa, Artificial Sequence
  Description of Artificial Sequence: Synthetic polypeptide
DVLMTQSPLSLPVTPGEPASISCRSSQSIVHSSGITYLEWYLQKPGQSPQLLIYKVSNRFSGVPDRFSGSGSGTDFTLKISRVEAEDVGVYYCFQGSHVPYTFGQGTKVEIKRTVAAPSVFIFPPSDEQLKSGTASVVCLLNNFYPREAKVQWKVDNALQSGNSQESVTEQDSKDSTYSLSSTLTLSKADYEKHKVYACEVTHQGLSSPVTKSFNRGECGGGGSGGGGSQVQLVQSGAEVKKPGASVKVSCKASGYTFTGYYMHWVRQAPGQGLEWMGWINPDSGGTNYAQKFQGRVTMTRDTSISTAYMELNRLRSDDTAVYYCARDQPLGYCTNGVCSYFDYWGQGTLVTVSSGGGGSGGGGSGGGGSGGGGSDIQMTQSPSSVSASVGDRVTITCRASQGIYSWLAWYQQKPGKAPNLLIYTASTLQSGVPSRFSGSGSGTDFTLTISSLQPEDFATYYCQQANIFPLTFGGGTKVEIK

SEQ ID NO: 323 - protein, 458 aa, Artificial Sequence
  Description of Artificial Sequence: Synthetic polypeptide
EVQLLESGGGLVQPGGSLRLSCAASGFTFSHYMMAWVRQAPGKGLEWVSRIGPSGGPTHYADSVKGRFTISRDNSKNTLYLQMNSLRAEDTAVYYCAGYDSGYDYVAVAGPAEYFQHWGQGTLVTVSSASTKGPSVFPLAPSSKSTSGGTAALGCLVKDYFPEPVTVSWNSGALTSGVHTFPAVLQSSGLYSLSSVVTVPSSSLGTQTYICNVNHKPSNTKVDKKVEPKSCDKTHTCPPCPAPELLGGPSVFLFPPKPKDTLMISRTPEVTCVVVDVSHEDPEVKFNWYVDGVEVHNAKTKPREEQYNSTYRVVSVLTVLHQDWLNGKEYKCKVSNKALPAPIEKTISKAKGQPREPQVYTLPPSREEMTKNQVSLTCLVKGFYPSDIAVEWESNGQPENNYKTTPPVLDSDGSFFLYSKLTVDKSRWQQGNVFSCSVMHEALHNHYTQKSLSLSPGK

SEQ ID NO: 324 - protein, 128 aa, Artificial Sequence
  Description of Artificial Sequence: Synthetic polypeptide
EVQLLESGGGLVQPGGSLRLSCAASGFTFSHYMMAWVRQAPGKGLEWVSRIGPSGGPTHYADSVKGRFTISRDNSKNTLYLQMNSLRAEDTAVYYCAGYDSGYDYVAVAGPAEYFQHWGQGTLVTVSS

SEQ ID NO: 325 - protein, 8 aa, Artificial Sequence
  Description of Artificial Sequence: Synthetic peptide
GFTFSHYM

SEQ ID NO: 326 - protein, 8 aa, Artificial Sequence
  Description of Artificial Sequence: Synthetic peptide
IGPSGGPT

SEQ ID NO: 327 - protein, 21 aa, Artificial Sequence
  Description of Artificial Sequence: Synthetic peptide
AGYDSGYDYVAVAGPAEYFQH

SEQ ID NO: 328 - protein, 214 aa, Artificial Sequence
  Description of Artificial Sequence: Synthetic polypeptide
DIQMTQSPSSLSASVGDRVTITCRASQSISTWLAWYQQKPGKAPKLLIYKASNLHTGVPSRFSGSGSGTEFSLTISGLQPDDFATYYCQQYNSYSRTFGQGTKVEIKRTVAAPSVFIFPPSDEQLKSGTASVVCLLNNFYPREAKVQWKVDNALQSGNSQESVTEQDSKDSTYSLSSTLTLSKADYEKHKVYACEVTHQGLSSPVTKSFNRGEC

SEQ ID NO: 329 - protein, 107 aa, Artificial Sequence
  Description of Artificial Sequence: Synthetic polypeptide
DIQMTQSPSSLSASVGDRVTITCRASQSISTWLAWYQQKPGKAPKLLIYKASNLHTGVPSRFSGSGSGTEFSLTISGLQPDDFATYYCQQYNSYSRTFGQGTKVEIK

SEQ ID NO: 330 - protein, 6 aa, Artificial Sequence
  Description of Artificial Sequence: Synthetic peptide
QSISTW

SEQ ID NO: 331 - protein, 3 aa, Artificial Sequence
  Description of Artificial Sequence: Synthetic peptide
KAS

SEQ ID NO: 332 - protein, 9 aa, Artificial Sequence
  Description of Artificial Sequence: Synthetic peptide
QQYNSYSRT

SEQ ID NO: 333 - protein, 720 aa, Artificial Sequence
  Description of Artificial Sequence: Synthetic polypeptide
QVQLVQSGAEVKKPGASVKVSCKASGYTFTGYYMHWVRQAPGQGLEWMGWINPDSGGTNYAQKFQGRVTMTRDTSISTAYMELNRLRSDDTAVYYCARDQPLGYCTNGVCSYFDYWGQGTLVTVSSASTKGPSVFPLAPSSKSTSGGTAALGCLVKDYFPEPVTVSWNSGALTSGVHTFPAVLQSSGLYSLSSVVTVPSSSLGTQTYICNVNHKPSNTKVDKKVEPKSCDKTHTCPPCPAPELLGGPSVFLFPPKPKDTLMISRTPEVTCVVVDVSHEDPEVKFNWYVDGVEVHNAKTKPREEQYNSTYRVVSVLTVLHQDWLNGKEYKCKVSNKALPAPIEKTISKAKGQPREPQVYTLPPSREEMTKNQVSLTCLVKGFYPSDIAVEWESNGQPENNYKTTPPVLDSDGSFFLYSKLTVDKSRWQQGNVFSCSVMHEALHNHYTQKSLSLSPGGGGGSGGGGSEVQLLESGGGLVQPGGSLRLSCAASGFTFSHYMMAWVRQAPGKGLEWVSRIGPSGGPTHYADSVKGRFTISRDNSKNTLYLQMNSLRAEDTAVYYCAGYDSGYDYVAVAGPAEYFQHWGQGTLVTVSSGGGGSGGGGSGGGGSGGGGSDIQMTQSPSSLSASVGDRVTITCRASQSISTWLAWYQQKPGKAPKLLIYKASNLHTGVPSRFSGSGSGTEFSLTISGLQPDDFATYYCQQYNSYSRTFGQGTKVEIK

SEQ ID NO: 334 - protein, 720 aa, Artificial Sequence
  Description of Artificial Sequence: Synthetic polypeptide
EVQLLESGGGLVQPGGSLRLSCAASGFTFSHYMMAWVRQAPGKGLEWVSRIGPSGGPTHYADSVKGRFTISRDNSKNTLYLQMNSLRAEDTAVYYCAGYDSGYDYVAVAGPAEYFQHWGQGTLVTVSSASTKGPSVFPLAPSSKSTSGGTAALGCLVKDYFPEPVTVSWNSGALTSGVHTFPAVLQSSGLYSLSSVVTVPSSSLGTQTYICNVNHKPSNTKVDKKVEPKSCDKTHTCPPCPAPELLGGPSVFLFPPKPKDTLMISRTPEVTCVVVDVSHEDPEVKFNWYVDGVEVHNAKTKPREEQYNSTYRVVSVLTVLHQDWLNGKEYKCKVSNKALPAPIEKTISKAKGQPREPQVYTLPPSREEMTKNQVSLTCLVKGFYPSDIAVEWESNGQPENNYKTTPPVLDSDGSFFLYSKLTVDKSRWQQGNVFSCSVMHEALHNHYTQKSLSLSPGGGGGSGGGGSQVQLVQSGAEVKKPGASVKVSCKASGYTFTGYYMHWVRQAPGQGLEWMGWINPDSGGTNYAQKFQGRVTMTRDTSISTAYMELNRLRSDDTAVYYCARDQPLGYCTNGVCSYFDYWGQGTLVTVSSGGGGSGGGGSGGGGSGGGGSDIQMTQSPSSVSASVGDRVTITCRASQGIYSWLAWYQQKPGKAPNLLIYTASTLQSGVPSRFSGSGSGTDFTLTISSLQPEDFATYYCQQANIFPLTFGGGTKVEIK

SEQ ID NO: 335 - protein, 477 aa, Artificial Sequence
  Description of Artificial Sequence: Synthetic polypeptide
DIQMTQSPSSLSASVGDRVTITCRASQSISTWLAWYQQKPGKAPKLLIYKASNLHTGVPSRFSGSGSGTEFSLTISGLQPDDFATYYCQQYNSYSRTFGQGTKVEIKRTVAAPSVFIFPPSDEQLKSGTASVVCLLNNFYPREAKVQWKVDNALQSGNSQESVTEQDSKDSTYSLSSTLTLSKADYEKHKVYACEVTHQGLSSPVTKSFNRGECGGGGSGGGGSQVQLVQSGAEVKKPGASVKVSCKASGYTFTGYYMHWVRQAPGQGLEWMGWINPDSGGTNYAQKFQGRVTMTRDTSISTAYMELNRLRSDDTAVYYCARDQPLGYCTNGVCSYFDYWGQGTLVTVSSGGGGSGGGGSGGGGSGGGGSDIQMTQSPSSVSASVGDRVTITCRASQGIYSWLAWYQQKPGKAPNLLIYTASTLQSGVPSRFSGSGSGTDFTLTISSLQPEDFATYYCQQANIFPLTFGGGTKVEIK

SEQ ID NO: 336 - protein, 452 aa, Artificial Sequence
  Description of Artificial Sequence: Synthetic polypeptide
EVQLVESGGGLVQPGGSLRLSCAASGFTFSSYLMTWVRQAPGKGLEWVANIKQDGSEKYYVDSVKGRFTISRDNAKNSLNLQMNSLRAEDTAVYYCTRDGYSSGRHYGMDVWGQGTTVIVSSASTKGPSVFPLAPSSKSTSGGTAALGCLVKDYFPEPVTVSWNSGALTSGVHTFPAVLQSSGLYSLSSVVTVPSSSLGTQTYICNVNHKPSNTKVDKRVEPKSCDKTHTCPPCPAPELLGGPSVFLFPPKPKDTLMISRTPEVTCVVVDVSHEDPEVKFNWYVDGVEVHNAKTKPREEQYNSTYRVVSVLTVLHQDWLNGKEYKCKVSNKALPAPIEKTISKAKGQPREPQVYTLPPSREEMTKNQVSLTCLVKGFYPSDIAVEWESNGQPENNYKTTPPVLDSDGSFFLYSKLTVDKSRWQQGNVFSCSVMHEALHNHYTQKSLSLSPGK

SEQ ID NO: 337 - protein, 122 aa, Artificial Sequence
  Description of Artificial Sequence: Synthetic polypeptide
EVQLVESGGGLVQPGGSLRLSCAASGFTFSSYLMTWVRQAPGKGLEWVANIKQDGSEKYYVDSVKGRFTISRDNAKNSLNLQMNSLRAEDTAVYYCTRDGYSSGRHYGMDVWGQGTTVIVSS

SEQ ID NO: 338 - protein, 8 aa, Artificial Sequence
  Description of Artificial Sequence: Synthetic peptide
GFTFSSYL

SEQ ID NO: 339 - protein, 8 aa, Artificial Sequence
  Description of Artificial Sequence: Synthetic peptide
IKQDGSEK

SEQ ID NO: 340 - protein, 15 aa, Artificial Sequence
  Description of Artificial Sequence: Synthetic peptide
TRDGYSSGRHYGMDV

SEQ ID NO: 341 - protein, 214 aa, Artificial Sequence
  Description of Artificial Sequence: Synthetic polypeptide
EIVLTQSPATLSLSPGERATLSCRASQSVSRYLAWYQQKPGQAPRLLIYDASNRATGIPARFSGSGSGTDFTLTISSLEPEDFAVYYCQQRSNWPRTFGQGTKVEIKRTVAAPSVFIFPPSDEQLKSGTASVVCLLNNFYPREAKVQWKVDNALQSGNSQESVTEQDSKDSTYSLSSTLTLSKADYEKHKVYACEVTHQGLSSPVTKSFNRGEC

SEQ ID NO: 342 - protein, 107 aa, Artificial Sequence
  Description of Artificial Sequence: Synthetic polypeptide
EIVLTQSPATLSLSPGERATLSCRASQSVSRYLAWYQQKPGQAPRLLIYDASNRATGIPARFSGSGSGTDFTLTISSLEPEDFAVYYCQQRSNWPRTFGQGTKVEIK

SEQ ID NO: 343 - protein, 6 aa, Artificial Sequence
  Description of Artificial Sequence: Synthetic peptide
QSVSRY

SEQ ID NO: 344 - protein, 3 aa, Artificial Sequence
  Description of Artificial Sequence: Synthetic peptide
DAS

SEQ ID NO: 345 - protein, 9 aa, Artificial Sequence
  Description of Artificial Sequence: Synthetic peptide
QQRSNWPRT

SEQ ID NO: 346 - protein, 714 aa, Artificial Sequence
  Description of Artificial Sequence: Synthetic polypeptide
QVQLVQSGAEVKKPGASVKVSCKASGYTFTGYYMHWVRQAPGQGLEWMGWINPDSGGTNYAQKFQGRVTMTRDTSISTAYMELNRLRSDDTAVYYCARDQPLGYCTNGVCSYFDYWGQGTLVTVSSASTKGPSVFPLAPSSKSTSGGTAALGCLVKDYFPEPVTVSWNSGALTSGVHTFPAVLQSSGLYSLSSVVTVPSSSLGTQTYICNVNHKPSNTKVDKKVEPKSCDKTHTCPPCPAPELLGGPSVFLFPPKPKDTLMISRTPEVTCVVVDVSHEDPEVKFNWYVDGVEVHNAKTKPREEQYNSTYRVVSVLTVLHQDWLNGKEYKCKVSNKALPAPIEKTISKAKGQPREPQVYTLPPSREEMTKNQVSLTCLVKGFYPSDIAVEWESNGQPENNYKTTPPVLDSDGSFFLYSKLTVDKSRWQQGNVFSCSVMHEALHNHYTQKSLSLSPGGGGGSGGGGSEVQLVESGGGLVQPGGSLRLSCAASGFTFSSYLMTWVRQAPGKGLEWVANIKQDGSEKYYVDSVKGRFTISRDNAKNSLNLQMNSLRAEDTAVYYCTRDGYSSGRHYGMDVWGQGTTVIVSSGGGGSGGGGSGGGGSGGGGSEIVLTQSPATLSLSPGERATLSCRASQSVSRYLAWYQQKPGQAPRLLIYDASNRATGIPARFSGSGSGTDFTLTISSLEPEDFAVYYCQQRSNWPRTFGQGTKVEIK

SEQ ID NO: 347 - protein, 714 aa, Artificial Sequence
  Description of Artificial Sequence: Synthetic polypeptide
EVQLVESGGGLVQPGGSLRLSCAASGFTFSSYLMTWVRQAPGKGLEWVANIKQDGSEKYYVDSVKGRFTISRDNAKNSLNLQMNSLRAEDTAVYYCTRDGYSSGRHYGMDVWGQGTTVIVSSASTKGPSVFPLAPSSKSTSGGTAALGCLVKDYFPEPVTVSWNSGALTSGVHTFPAVLQSSGLYSLSSVVTVPSSSLGTQTYICNVNHKPSNTKVDKKVEPKSCDKTHTCPPCPAPELLGGPSVFLFPPKPKDTLMISRTPEVTCVVVDVSHEDPEVKFNWYVDGVEVHNAKTKPREEQYNSTYRVVSVLTVLHQDWLNGKEYKCKVSNKALPAPIEKTISKAKGQPREPQVYTLPPSREEMTKNQVSLTCLVKGFYPSDIAVEWESNGQPENNYKTTPPVLDSDGSFFLYSKLTVDKSRWQQGNVFSCSVMHEALHNHYTQKSLSLSPGGGGGSGGGGSQVQLVQSGAEVKKPGASVKVSCKASGYTFTGYYMHWVRQAPGQGLEWMGWINPDSGGTNYAQKFQGRVTMTRDTSISTAYMELNRLRSDDTAVYYCARDQPLGYCTNGVCSYFDYWGQGTLVTVSSGGGGSGGGGSGGGGSGGGGSDIQMTQSPSSVSASVGDRVTITCRASQGIYSWLAWYQQKPGKAPNLLIYTASTLQSGVPSRFSGSGSGTDFTLTISSLQPEDFATYYCQQANIFPLTFGGGTKVEIK

SEQ ID NO: 348 - protein, 477 aa, Artificial Sequence
  Description of Artificial Sequence: Synthetic polypeptide
EIVLTQSPATLSLSPGERATLSCRASQSVSRYLAWYQQKPGQAPRLLIYDASNRATGIPARFSGSGSGTDFTLTISSLEPEDFAVYYCQQRSNWPRTFGQGTKVEIKRTVAAPSVFIFPPSDEQLKSGTASVVCLLNNFYPREAKVQWKVDNALQSGNSQESVTEQDSKDSTYSLSSTLTLSKADYEKHKVYACEVTHQGLSSPVTKSFNRGECGGGGSGGGGSQVQLVQSGAEVKKPGASVKVSCKASGYTFTGYYMHWVRQAPGQGLEWMGWINPDSGGTNYAQKFQGRVTMTRDTSISTAYMELNRLRSDDTAVYYCARDQPLGYCTNGVCSYFDYWGQGTLVTVSSGGGGSGGGGSGGGGSGGGGSDIQMTQSPSSVSASVGDRVTITCRASQGIYSWLAWYQQKPGKAPNLLIYTASTLQSGVPSRFSGSGSGTDFTLTISSLQPEDFATYYCQQANIFPLTFGGGTKVEIK

SEQ ID NO: 349 - protein, 450 aa, Artificial Sequence
  Description of Artificial Sequence: Synthetic polypeptide
EVQLVESGPALVKPTQTLTLTCTVSGFSLTGYSVNWIRQPPGKALEWLGMIWGDGSTDYNSALKSRLTISKDTSKNQVVLTMTNMDPVDTATYYCARDYYFNYASWFAYWGQGTLVTVSSASTKGPSVFPLAPSSKSTSGGTAALGCLVKDYFPEPVTVSWNSGALTSGVHTFPAVLQSSGLYSLSSVVTVPSSSLGTQTYICNVNHKPSNTKVDKKVEPKSCDKTHTCPPCPAPELLGGPSVFLFPPKPKDTLMISRTPEVTCVVVDVSHEDPEVKFNWYVDGVEVHNAKTKPREEQYNSTYRVVSVLTVLHQDWLNGKEYKCKVSNKALPAPIEKTISKAKGQPREPQVYTLPPSREEMTKNQVSLTCLVKGFYPSDIAVEWESNGQPENNYKTTPPVLDSDGSFFLYSKLTVDKSRWQQGNVFSCSVMHEALHNHYTQKSLSLSPGK

SEQ ID NO: 350 - protein, 120 aa, Artificial Sequence
  Description of Artificial Sequence: Synthetic polypeptide
EVQLVESGPALVKPTQTLTLTCTVSGFSLTGYSVNWIRQPPGKALEWLGMIWGDGSTDYNSALKSRLTISKDTSKNQVVLTMTNMDPVDTATYYCARDYYFNYASWFAYWGQGTLVTVSS

SEQ ID NO: 351 - protein, 8 aa, Artificial Sequence
  Description of Artificial Sequence: Synthetic peptide
GFSLTGYS

SEQ ID NO: 352 - protein, 7 aa, Artificial Sequence
  Description of Artificial Sequence: Synthetic peptide
IWGDGST

SEQ ID NO: 353 - protein, 14 aa, Artificial Sequence
  Description of Artificial Sequence: Synthetic peptide
ARDYYFNYASWFAY

SEQ ID NO: 354 - protein, 214 aa, Artificial Sequence
  Description of Artificial Sequence: Synthetic polypeptide
DIQMTQSPSSLSASVGDRVTITCSASQGISNYLNWYQQKPGKTVKLLIYYTSNLHSGVPSRFSGSGSGTDYTLTISSLQPEDFATYYCQQYSELPWTFGQGTKVEIKRTVAAPSVFIFPPSDEQLKSGTASVVCLLNNFYPREAKVQWKVDNALQSGNSQESVTEQDSKDSTYSLSSTLTLSKADYEKHKVYACEVTHQGLSSPVTKSFNRGEC

SEQ ID NO: 355 - protein, 107 aa, Artificial Sequence
  Description of Artificial Sequence: Synthetic polypeptide
DIQMTQSPSSLSASVGDRVTITCSASQGISNYLNWYQQKPGKTVKLLIYYTSNLHSGVPSRFSGSGSGTDYTLTISSLQPEDFATYYCQQYSELPWTFGQGTKVEIK

SEQ ID NO: 356 - protein, 7 aa, Artificial Sequence
  Description of Artificial Sequence: Synthetic peptide
QGISNYL

SEQ ID NO: 357 - protein, 3 aa, Artificial Sequence
  Description of Artificial Sequence: Synthetic peptide
YTS

SEQ ID NO: 358 - protein, 9 aa, Artificial Sequence
  Description of Artificial Sequence: Synthetic peptide
QQYSELPWT

SEQ ID NO: 359 - protein, 712 aa, Artificial Sequence
  Description of Artificial Sequence: Synthetic polypeptide
QVQLVQSGAEVKKPGASVKVSCKASGYTFTGYYMHWVRQAPGQGLEWMGWINPDSGGTNYAQKFQGRVTMTRDTSISTAYMELNRLRSDDTAVYYCARDQPLGYCTNGVCSYFDYWGQGTLVTVSSASTKGPSVFPLAPSSKSTSGGTAALGCLVKDYFPEPVTVSWNSGALTSGVHTFPAVLQSSGLYSLSSVVTVPSSSLGTQTYICNVNHKPSNTKVDKKVEPKSCDKTHTCPPCPAPELLGGPSVFLFPPKPKDTLMISRTPEVTCVVVDVSHEDPEVKFNWYVDGVEVHNAKTKPREEQYNSTYRVVSVLTVLHQDWLNGKEYKCKVSNKALPAPIEKTISKAKGQPREPQVYTLPPSREEMTKNQVSLTCLVKGFYPSDIAVEWESNGQPENNYKTTPPVLDSDGSFFLYSKLTVDKSRWQQGNVFSCSVMHEALHNHYTQKSLSLSPGGGGGSGGGGSEVQLVESGPALVKPTQTLTLTCTVSGFSLTGYSVNWIRQPPGKALEWLGMIWGDGSTDYNSALKSRLTISKDTSKNQVVLTMTNMDPVDTATYYCARDYYFNYASWFAYWGQGTLVTVSSGGGGSGGGGSGGGGSGGGGSDIQMTQSPSSLSASVGDRVTITCSASQGISNYLNWYQQKPGKTVKLLIYYTSNLHSGVPSRFSGSGSGTDYTLTISSLQPEDFATYYCQQYSELPWTFGQGTKVEIK

SEQ ID NO: 360 - protein, 712 aa, Artificial Sequence
  Description of Artificial Sequence: Synthetic polypeptide
EVQLVESGPALVKPTQTLTLTCTVSGFSLTGYSVNWIRQPPGKALEWLGMIWGDGSTDYNSALKSRLTISKDTSKNQVVLTMTNMDPVDTATYYCARDYYFNYASWFAYWGQGTLVTVSSASTKGPSVFPLAPSSKSTSGGTAALGCLVKDYFPEPVTVSWNSGALTSGVHTFPAVLQSSGLYSLSSVVTVPSSSLGTQTYICNVNHKPSNTKVDKKVEPKSCDKTHTCPPCPAPELLGGPSVFLFPPKPKDTLMISRTPEVTCVVVDVSHEDPEVKFNWYVDGVEVHNAKTKPREEQYNSTYRVVSVLTVLHQDWLNGKEYKCKVSNKALPAPIEKTISKAKGQPREPQVYTLPPSREEMTKNQVSLTCLVKGFYPSDIAVEWESNGQPENNYKTTPPVLDSDGSFFLYSKLTVDKSRWQQGNVFSCSVMHEALHNHYTQKSLSLSPGGGGGSGGGGSQVQLVQSGAEVKKPGASVKVSCKASGYTFTGYYMHWVRQAPGQGLEWMGWINPDSGGTNYAQKFQGRVTMTRDTSISTAYMELNRLRSDDTAVYYCARDQPLGYCTNGVCSYFDYWGQGTLVTVSSGGGGSGGGGSGGGGSGGGGSDIQMTQSPSSVSASVGDRVTITCRASQGIYSWLAWYQQKPGKAPNLLIYTASTLQSGVPSRFSGSGSGTDFTLTISSLQPEDFATYYCQQANIFPLTFGGGTKVEIK

SEQ ID NO: 361 - protein, 477 aa, Artificial Sequence
  Description of Artificial Sequence: Synthetic polypeptide
DIQMTQSPSSLSASVGDRVTITCSASQGISNYLNWYQQKPGKTVKLLIYYTSNLHSGVPSRFSGSGSGTDYTLTISSLQPEDFATYYCQQYSELPWTFGQGTKVEIKRTVAAPSVFIFPPSDEQLKSGTASVVCLLNNFYPREAKVQWKVDNALQSGNSQESVTEQDSKDSTYSLSSTLTLSKADYEKHKVYACEVTHQGLSSPVTKSFNRGECGGGGSGGGGSQVQLVQSGAEVKKPGASVKVSCKASGYTFTGYYMHWVRQAPGQGLEWMGWINPDSGGTNYAQKFQGRVTMTRDTSISTAYMELNRLRSDDTAVYYCARDQPLGYCTNGVCSYFDYWGQGTLVTVSSGGGGSGGGGSGGGGSGGGGSDIQMTQSPSSVSASVGDRVTITCRASQGIYSWLAWYQQKPGKAPNLLIYTASTLQSGVPSRFSGSGSGTDFTLTISSLQPEDFATYYCQQANIFPLTFGGGTKVEIK

SEQ ID NO: 362 - protein, 449 aa, Artificial Sequence
  Description of Artificial Sequence: Synthetic polypeptide
EVQLVESGGGVVQPGRSLRLSCSASGFTFSGYGLSWVRQAPGKGLEWVAMISSGGSYTYYADSVKGRFAISRDNAKNTLFLQMDSLRPEDTGVYFCARHGDDPAWFAYWGQGTPVTVSSASTKGPSVFPLAPSSKSTSGGTAALGCLVKDYFPEPVTVSWNSGALTSGVHTFPAVLQSSGLYSLSSVVTVPSSSLGTQTYICNVNHKPSNTKVDKKVEPKSCDKTHTCPPCPAPELLGGPSVFLFPPKPKDTLMISRTPEVTCVVVDVSHEDPEVKFNWYVDGVEVHNAKTKPREEQYNSTYRVVSVLTVLHQDWLNGKEYKCKVSNKALPAPIEKTISKAKGQPREPQVYTLPPSRDELTKNQVSLTCLVKGFYPSDIAVEWESNGQPENNYKTTPPVLDSDGSFFLYSKLTVDKSRWQQGNVFSCSVMHEALHNHYTQKSLSLSPGK

SEQ ID NO: 363 - protein, 119 aa, Artificial Sequence
  Description of Artificial Sequence: Synthetic polypeptide
EVQLVESGGGVVQPGRSLRLSCSASGFTFSGYGLSWVRQAPGKGLEWVAMISSGGSYTYYADSVKGRFAISRDNAKNTLFLQMDSLRPEDTGVYFCARHGDDPAWFAYWGQGTPVTVSS

SEQ ID NO: 364 - protein, 8 aa, Artificial Sequence
  Description of Artificial Sequence: Synthetic peptide
GFTFSGYG

SEQ ID NO: 365 - protein, 8 aa, Artificial Sequence
  Description of Artificial Sequence: Synthetic peptide
ISSGGSYT

SEQ ID NO: 366 - protein, 12 aa, Artificial Sequence
  Description of Artificial Sequence: Synthetic peptide
ARHGDDPAWFAY

SEQ ID NO: 367 - protein, 217 aa, Artificial Sequence
  Description of Artificial Sequence: Synthetic polypeptide
DIQLTQSPSSLSASVGDRVTITCSVSSSISSNNLHWYQQKPGKAPKPWIYGTSNLASGVPSRFSGSGSGTDYTFTISSLQPEDIATYYCQQWSSYPYMYTFGQGTKVEIKRTVAAPSVFIFPPSDEQLKSGTASVVCLLNNFYPREAKVQWKVDNALQSGNSQESVTEQDSKDSTYSLSSTLTLSKADYEKHKVYACEVTHQGLSSPVTKSFNRGEC

SEQ ID NO: 368 - protein, 110 aa, Artificial Sequence
  Description of Artificial Sequence: Synthetic polypeptide
DIQLTQSPSSLSASVGDRVTITCSVSSSISSNNLHWYQQKPGKAPKPWIYGTSNLASGVPSRFSGSGSGTDYTFTISSLQPEDIATYYCQQWSSYPYMYTFGQGTKVEIK

SEQ ID NO: 369 - protein, 7 aa, Artificial Sequence
  Description of Artificial Sequence: Synthetic peptide
SSISSNN

SEQ ID NO: 370 - protein, 3 aa, Artificial Sequence
  Description of Artificial Sequence: Synthetic peptide
GTS

SEQ ID NO: 371 - protein, 11 aa, Artificial Sequence
  Description of Artificial Sequence: Synthetic peptide
QQWSSYPYMYT

SEQ ID NO: 372 - protein, 714 aa, Artificial Sequence
  Description of Artificial Sequence: Synthetic polypeptide
QVQLVQSGAEVKKPGASVKVSCKASGYTFTGYYMHWVRQAPGQGLEWMGWINPDSGGTNYAQKFQGRVTMTRDTSISTAYMELNRLRSDDTAVYYCARDQPLGYCTNGVCSYFDYWGQGTLVTVSSASTKGPSVFPLAPSSKSTSGGTAALGCLVKDYFPEPVTVSWNSGALTSGVHTFPAVLQSSGLYSLSSVVTVPSSSLGTQTYICNVNHKPSNTKVDKKVEPKSCDKTHTCPPCPAPELLGGPSVFLFPPKPKDTLMISRTPEVTCVVVDVSHEDPEVKFNWYVDGVEVHNAKTKPREEQYNSTYRVVSVLTVLHQDWLNGKEYKCKVSNKALPAPIEKTISKAKGQPREPQVYTLPPSREEMTKNQVSLTCLVKGFYPSDIAVEWESNGQPENNYKTTPPVLDSDGSFFLYSKLTVDKSRWQQGNVFSCSVMHEALHNHYTQKSLSLSPGGGGGSGGGGSEVQLVESGGGVVQPGRSLRLSCSASGFTFSGYGLSWVRQAPGKGLEWVAMISSGGSYTYYADSVKGRFAISRDNAKNTLFLQMDSLRPEDTGVYFCARHGDDPAWFAYWGQGTPVTVSSGGGGSGGGGSGGGGSGGGGSDIQLTQSPSSLSASVGDRVTITCSVSSSISSNNLHWYQQKPGKAPKPWIYGTSNLASGVPSRFSGSGSGTDYTFTISSLQPEDIATYYCQQWSSYPYMYTFGQGTKVEIK

SEQ ID NO: 373 - protein, 711 aa, Artificial Sequence
  Description of Artificial Sequence: Synthetic polypeptide
EVQLVESGGGVVQPGRSLRLSCSASGFTFSGYGLSWVRQAPGKGLEWVAMISSGGSYTYYADSVKGRFAISRDNAKNTLFLQMDSLRPEDTGVYFCARHGDDPAWFAYWGQGTPVTVSSASTKGPSVFPLAPSSKSTSGGTAALGCLVKDYFPEPVTVSWNSGALTSGVHTFPAVLQSSGLYSLSSVVTVPSSSLGTQTYICNVNHKPSNTKVDKKVEPKSCDKTHTCPPCPAPELLGGPSVFLFPPKPKDTLMISRTPEVTCVVVDVSHEDPEVKFNWYVDGVEVHNAKTKPREEQYNSTYRVVSVLTVLHQDWLNGKEYKCKVSNKALPAPIEKTISKAKGQPREPQVYTLPPSREEMTKNQVSLTCLVKGFYPSDIAVEWESNGQPENNYKTTPPVLDSDGSFFLYSKLTVDKSRWQQGNVFSCSVMHEALHNHYTQKSLSLSPGGGGGSGGGGSQVQLVQSGAEVKKPGASVKVSCKASGYTFTGYYMHWVRQAPGQGLEWMGWINPDSGGTNYAQKFQGRVTMTRDTSISTAYMELNRLRSDDTAVYYCARDQPLGYCTNGVCSYFDYWGQGTLVTVSSGGGGSGGGGSGGGGSGGGGSDIQMTQSPSSVSASVGDRVTITCRASQGIYSWLAWYQQKPGKAPNLLIYTASTLQSGVPSRFSGSGSGTDFTLTISSLQPEDFATYYCQQANIFPLTFGGGTKVEIK

SEQ ID NO: 374 - protein, 480 aa, Artificial Sequence
  Description of Artificial Sequence: Synthetic polypeptide
DIQLTQSPSSLSASVGDRVTITCSVSSSISSNNLHWYQQKPGKAPKPWIYGTSNLASGVPSRFSGSGSGTDYTFTISSLQPEDIATYYCQQWSSYPYMYTFGQGTKVEIKRTVAAPSVFIFPPSDEQLKSGTASVVCLLNNFYPREAKVQWKVDNALQSGNSQESVTEQDSKDSTYSLSSTLTLSKADYEKHKVYACEVTHQGLSSPVTKSFNRGECGGGGSGGGGSQVQLVQSGAEVKKPGASVKVSCKASGYTFTGYYMHWVRQAPGQGLEWMGWINPDSGGTNYAQKFQGRVTMTRDTSISTAYMELNRLRSDDTAVYYCARDQPLGYCTNGVCSYFDYWGQGTLVTVSSGGGGSGGGGSGGGGSGGGGSDIQMTQSPSSVSASVGDRVTITCRASQGIYSWLAWYQQKPGKAPNLLIYTASTLQSGVPSRFSGSGSGTDFTLTISSLQPEDFATYYCQQANIFPLTFGGGTKVEIK

SEQ ID NO: 375 - protein, 447 aa, Artificial Sequence
  Description of Artificial Sequence: Synthetic polypeptide
QVQLVQSGAEVVKPGASVKISCKASGYTFTGYFMNWVKQSPGQSLEWIGRIHPYDGDTFYNQKFQGKATLTVDKSSNTAHMELLSLTSEDFAVYYCTRYDGSRAMDYWGQGTTVTVSSASTKGPSVFPLAPSSKSTSGGTAALGCLVKDYFPEPVTVSWNSGALTSGVHTFPAVLQSSGLYSLSSVVTVPSSSLGTQTYICNVNHKPSNTKVDKKVEPKSCDKTHTCPPCPAPELLGGPSVFLFPPKPKDTLMISRTPEVTCVVVDVSHEDPEVKFNWYVDGVEVHNAKTKPREEQYNSTYRVVSVLTVLHQDWLNGKEYKCKVSNKALPAPIEKTISKAKGQPREPQVYTLPPSRDELTKNQVSLTCLVKGFYPSDIAVEWESNGQPENNYKTTPPVLDSDGSFFLYSKLTVDKSRWQQGNVFSCSVMHEALHNHYTQKSLSLSPG

SEQ ID NO: 376 - protein, 118 aa, Artificial Sequence
  Description of Artificial Sequence: Synthetic polypeptide
QVQLVQSGAEVVKPGASVKISCKASGYTFTGYFMNWVKQSPGQSLEWIGRIHPYDGDTFYNQKFQGKATLTVDKSSNTAHMELLSLTSEDFAVYYCTRYDGSRAMDYWGQGTTVTVSS

SEQ ID NO: 377 - protein, 8 aa, Artificial Sequence
  Description of Artificial Sequence: Synthetic peptide
GYTFTGYF

SEQ ID NO: 378 - protein, 8 aa, Artificial Sequence
  Description of Artificial Sequence: Synthetic peptide
IHPYDGDT

SEQ ID NO: 379 - protein, 11 aa, Artificial Sequence
  Description of Artificial Sequence: Synthetic peptide
TRYDGSRAMDY

SEQ ID NO: 380 - protein, 218 aa, Artificial Sequence
  Description of Artificial Sequence: Synthetic polypeptide
DIVLTQSPLSLAVSLGQPAIISCKASQSVSFAGTSLMHWYHQKPGQQPRLLIYRASNLEAGVPDRFSGSGSKTDFTLTISPVEAEDAATYYCQQSREYPYTFGGGTKLEIKRTVAAPSVFIFPPSDEQLKSGTASVVCLLNNFYPREAKVQWKVDNALQSGNSQESVTEQDSKDSTYSLSSTLTLSKADYEKHKVYACEVTHQGLSSPVTKSFNRGEC

SEQ ID NO: 381 - protein, 111 aa, Artificial Sequence
  Description of Artificial Sequence: Synthetic polypeptide
DIVLTQSPLSLAVSLGQPAIISCKASQSVSFAGTSLMHWYHQKPGQQPRLLIYRASNLEAGVPDRFSGSGSKTDFTLTISPVEAEDAATYYCQQSREYPYTFGGGTKLEIK

SEQ ID NO: 382 - protein, 10 aa, Artificial Sequence
  Description of Artificial Sequence: Synthetic peptide
QSVSFAGTSL

SEQ ID NO: 383 - protein, 3 aa, Artificial Sequence
  Description of Artificial Sequence: Synthetic peptide
RAS

SEQ ID NO: 384 - protein, 9 aa, Artificial Sequence
  Description of Artificial Sequence: Synthetic peptide
QQSREYPYT

SEQ ID NO: 385 - protein, 714 aa, Artificial Sequence
  Description of Artificial Sequence: Synthetic polypeptide
QVQLVQSGAEVKKPGASVKVSCKASGYTFTGYYMHWVRQAPGQGLEWMGWINPDSGGTNYAQKFQGRVTMTRDTSISTAYMELNRLRSDDTAVYYCARDQPLGYCTNGVCSYFDYWGQGTLVTVSSASTKGPSVFPLAPSSKSTSGGTAALGCLVKDYFPEPVTVSWNSGALTSGVHTFPAVLQSSGLYSLSSVVTVPSSSLGTQTYICNVNHKPSNTKVDKKVEPKSCDKTHTCPPCPAPELLGGPSVFLFPPKPKDTLMISRTPEVTCVVVDVSHEDPEVKFNWYVDGVEVHNAKTKPREEQYNSTYRVVSVLTVLHQDWLNGKEYKCKVSNKALPAPIEKTISKAKGQPREPQVYTLPPSREEMTKNQVSLTCLVKGFYPSDIAVEWESNGQPENNYKTTPPVLDSDGSFFLYSKLTVDKSRWQQGNVFSCSVMHEALHNHYTQKSLSLSPGGGGGSGGGGSQVQLVQSGAEVVKPGASVKISCKASGYTFTGYFMNWVKQSPGQSLEWIGRIHPYDGDTFYNQKFQGKATLTVDKSSNTAHMELLSLTSEDFAVYYCTRYDGSRAMDYWGQGTTVTVSSGGGGSGGGGSGGGGSGGGGSDIVLTQSPLSLAVSLGQPAIISCKASQSVSFAGTSLMHWYHQKPGQQPRLLIYRASNLEAGVPDRFSGSGSKTDFTLTISPVEAEDAATYYCQQSREYPYTFGGGTKLEIK

SEQ ID NO: 386 - protein, 710 aa, Artificial Sequence
  Description of Artificial Sequence: Synthetic polypeptide
QVQLVQSGAEVVKPGASVKISCKASGYTFTGYFMNWVKQSPGQSLEWIGRIHPYDGDTFYNQKFQGKATLTVDKSSNTAHMELLSLTSEDFAVYYCTRYDGSRAMDYWGQGTTVTVSSASTKGPSVFPLAPSSKSTSGGTAALGCLVKDYFPEPVTVSWNSGALTSGVHTFPAVLQSSGLYSLSSVVTVPSSSLGTQTYICNVNHKPSNTKVDKKVEPKSCDKTHTCPPCPAPELLGGPSVFLFPPKPKDTLMISRTPEVTCVVVDVSHEDPEVKFNWYVDGVEVHNAKTKPREEQYNSTYRVVSVLTVLHQDWLNGKEYKCKVSNKALPAPIEKTISKAKGQPREPQVYTLPPSREEMTKNQVSLTCLVKGFYPSDIAVEWESNGQPENNYKTTPPVLDSDGSFFLYSKLTVDKSRWQQGNVFSCSVMHEALHNHYTQKSLSLSPGGGGGSGGGGSQVQLVQSGAEVKKPGASVKVSCKASGYTFTGYYMHWVRQAPGQGLEWMGWINPDSGGTNYAQKFQGRVTMTRDTSISTAYMELNRLRSDDTAVYYCARDQPLGYCTNGVCSYFDYWGQGTLVTVSSGGGGSGGGGSGGGGSGGGGSDIQMTQSPSSVSASVGDRVTITCRASQGIYSWLAWYQQKPGKAPNLLIYTASTLQSGVPSRFSGSGSGTDFTLTISSLQPEDFATYYCQQANIFPLTFGGGTKVEIK

SEQ ID NO: 387 - protein, 481 aa, Artificial Sequence
  Description of Artificial Sequence: Synthetic polypeptide
DIVLTQSPLSLAVSLGQPAIISCKASQSVSFAGTSLMHWYHQKPGQQPRLLIYRASNLEAGVPDRFSGSGSKTDFTLTISPVEAEDAATYYCQQSREYPYTFGGGTKLEIKRTVAAPSVFIFPPSDEQLKSGTASVVCLLNNFYPREAKVQWKVDNALQSGNSQESVTEQDSKDSTYSLSSTLTLSKADYEKHKVYACEVTHQGLSSPVTKSFNRGECGGGGSGGGGSQVQLVQSGAEVKKPGASVKVSCKASGYTFTGYYMHWVRQAPGQGLEWMGWINPDSGGTNYAQKFQGRVTMTRDTSISTAYMELNRLRSDDTAVYYCARDQPLGYCTNGVCSYFDYWGQGTLVTVSSGGGGSGGGGSGGGGSGGGGSDIQMTQSPSSVSASVGDRVTITCRASQGIYSWLAWYQQKPGKAPNLLIYTASTLQSGVPSRFSGSGSGTDFTLTISSLQPEDFATYYCQQANIFPLTFGGGTKVEIK

SEQ ID NO: 388 - protein, 445 aa, Artificial Sequence
  Description of Artificial Sequence: Synthetic polypeptide
EVQLQQSGPELKKPGTSVRISCKTSGYTFTEYTIHWVKQSHGKSLEWIGNINPNNGGTTYNQKFEDKATLTVDKSSSTAYMELRSLTSEDSAVYYCAAGWNFDYWGQGTTLTVSSASTKGPSVFPLAPSSKSTSGGTAALGCLVKDYFPEPVTVSWNSGALTSGVHTFPAVLQSSGLYSLSSVVTVPSSSLGTQTYICNVNHKPSNTKVDKKVEPKSCDKTHTCPPCPAPELLGGPSVFLFPPKPKDTLMISRTPEVTCVVVDVSHEDPEVKFNWYVDGVEVHNAKTKPREEQYNSTYRVVSVLTVLHQDWLNGKEYKCKVSNKALPAPIEKTISKAKGQPREPQVYTLPPSREEMTKNQVSLTCLVKGFYPSDIAVEWESNGQPENNYKTTPPVLDSDGSFFLYSKLTVDKSRWQQGNVFSCSVMHEALHNHYTQKSLSLSPGK

SEQ ID NO: 389 - protein, 115 aa, Artificial Sequence
  Description of Artificial Sequence: Synthetic polypeptide
EVQLQQSGPELKKPGTSVRISCKTSGYTFTEYTIHWVKQSHGKSLEWIGNINPNNGGTTYNQKFEDKATLTVDKSSSTAYMELRSLTSEDSAVYYCAAGWNFDYWGQGTTLTVSS

SEQ ID NO: 390 - protein, 8 aa, Artificial Sequence
  Description of Artificial Sequence: Synthetic peptide
GYTFTEYT

SEQ ID NO: 391 - protein, 8 aa, Artificial Sequence
  Description of Artificial Sequence: Synthetic peptide
INPNNGGT

SEQ ID NO: 392 - protein, 8 aa, Artificial Sequence
  Description of Artificial Sequence: Synthetic peptide
AAGWNFDY

SEQ ID NO: 393 - protein, 214 aa, Artificial Sequence
  Description of Artificial Sequence: Synthetic polypeptide
DIVMTQSHKFMSTSVGDRVSIICKASQDVGTAVDWYQQKPGQSPKLLIYWASTRHTGVPDRFTGSGSGTDFTLTITNVQSEDLADYFCQQYNSYPLTFGAGTMLDLKRTVAAPSVFIFPPSDEQLKSGTASVVCLLNNFYPREAKVQWKVDNALQSGNSQESVTEQDSKDSTYSLSSTLTLSKADYEKHKVYACEVTHQGLSSPVTKSFNRGEC

SEQ ID NO: 394 - protein, 107 aa, Artificial Sequence
  Description of Artificial Sequence: Synthetic polypeptide
DIVMTQSHKFMSTSVGDRVSIICKASQDVGTAVDWYQQKPGQSPKLLIYWASTRHTGVPDRFTGSGSGTDFTLTITNVQSEDLADYFCQQYNSYPLTFGAGTMLDLK

SEQ ID NO: 395 - protein, 6 aa, Artificial Sequence
  Description of Artificial Sequence: Synthetic peptide
QDVGTA

SEQ ID NO: 396 - protein, 3 aa, Artificial Sequence
  Description of Artificial Sequence: Synthetic peptide
WAS

SEQ ID NO: 397 - protein, 9 aa, Artificial Sequence
  Description of Artificial Sequence: Synthetic peptide
QQYNSYPLT

SEQ ID NO: 398 - protein, 707 aa, Artificial Sequence
  Description of Artificial Sequence: Synthetic polypeptide
QVQLVQSGAEVKKPGASVKVSCKASGYTFTGYYMHWVRQAPGQGLEWMGWINPDSGGTNYAQKFQGRVTMTRDTSISTAYMELNRLRSDDTAVYYCARDQPLGYCTNGVCSYFDYWGQGTLVTVSSASTKGPSVFPLAPSSKSTSGGTAALGCLVKDYFPEPVTVSWNSGALTSGVHTFPAVLQSSGLYSLSSVVTVPSSSLGTQTYICNVNHKPSNTKVDKKVEPKSCDKTHTCPPCPAPELLGGPSVFLFPPKPKDTLMISRTPEVTCVVVDVSHEDPEVKFNWYVDGVEVHNAKTKPREEQYNSTYRVVSVLTVLHQDWLNGKEYKCKVSNKALPAPIEKTISKAKGQPREPQVYTLPPSREEMTKNQVSLTCLVKGFYPSDIAVEWESNGQPENNYKTTPPVLDSDGSFFLYSKLTVDKSRWQQGNVFSCSVMHEALHNHYTQKSLSLSPGGGGGSGGGGSEVQLQQSGPELKKPGTSVRISCKTSGYTFTEYTIHWVKQSHGKSLEWIGNINPNNGGTTYNQKFEDKATLTVDKSSSTAYMELRSLTSEDSAVYYCAAGWNFDYWGQGTTLTVSSGGGGSGGGGSGGGGSGGGGSDIVMTQSHKFMSTSVGDRVSIICKASQDVGTAVDWYQQKPGQSPKLLIYWASTRHTGVPDRFTGSGSGTDFTLTITNVQSEDLADYFCQQYNSYPLTFGAGTMLDLK

SEQ ID NO: 399 - protein, 707 aa, Artificial Sequence
  Description of Artificial Sequence: Synthetic polypeptide
EVQLQQSGPELKKPGTSVRISCKTSGYTFTEYTIHWVKQSHGKSLEWIGNINPNNGGTTYNQKFEDKATLTVDKSSSTAYMELRSLTSEDSAVYYCAAGWNFDYWGQGTTLTVSSASTKGPSVFPLAPSSKSTSGGTAALGCLVKDYFPEPVTVSWNSGALTSGVHTFPAVLQSSGLYSLSSVVTVPSSSLGTQTYICNVNHKPSNTKVDKKVEPKSCDKTHTCPPCPAPELLGGPSVFLFPPKPKDTLMISRTPEVTCVVVDVSHEDPEVKFNWYVDGVEVHNAKTKPREEQYNSTYRVVSVLTVLHQDWLNGKEYKCKVSNKALPAPIEKTISKAKGQPREPQVYTLPPSREEMTKNQVSLTCLVKGFYPSDIAVEWESNGQPENNYKTTPPVLDSDGSFFLYSKLTVDKSRWQQGNVFSCSVMHEALHNHYTQKSLSLSPGGGGGSGGGGSQVQLVQSGAEVKKPGASVKVSCKASGYTFTGYYMHWVRQAPGQGLEWMGWINPDSGGTNYAQKFQGRVTMTRDTSISTAYMELNRLRSDDTAVYYCARDQPLGYCTNGVCSYFDYWGQGTLVTVSSGGGGSGGGGSGGGGSGGGGSDIQMTQSPSSVSASVGDRVTITCRASQGIYSWLAWYQQKPGKAPNLLIYTASTLQSGVPSRFSGSGSGTDFTLTISSLQPEDFATYYCQQANIFPLTFGGGTKVEIK

SEQ ID NO: 400 - protein, 477 aa, Artificial Sequence
  Description of Artificial Sequence: Synthetic polypeptide
DIVMTQSHKFMSTSVGDRVSIICKASQDVGTAVDWYQQKPGQSPKLLIYWASTRHTGVPDRFTGSGSGTDFTLTITNVQSEDLADYFCQQYNSYPLTFGAGTMLDLKRTVAAPSVFIFPPSDEQLKSGTASVVCLLNNFYPREAKVQWKVDNALQSGNSQESVTEQDSKDSTYSLSSTLTLSKADYEKHKVYACEVTHQGLSSPVTKSFNRGECGGGGSGGGGSQVQLVQSGAEVKKPGASVKVSCKASGYTFTGYYMHWVRQAPGQGLEWMGWINPDSGGTNYAQKFQGRVTMTRDTSISTAYMELNRLRSDDTAVYYCARDQPLGYCTNGVCSYFDYWGQGTLVTVSSGGGGSGGGGSGGGGSGGGGSDIQMTQSPSSVSASVGDRVTITCRASQGIYSWLAWYQQKPGKAPNLLIYTASTLQSGVPSRFSGSGSGTDFTLTISSLQPEDFATYYCQQANIFPLTFGGGTKVEIK

SEQ ID NO: 401 - protein, 445 aa, Artificial Sequence
  Description of Artificial Sequence: Synthetic polypeptide
EVQLQQSGPELVKPGTSVRISCKTSGYTFTEYTIHWVKQSHGKSLEWIGNINPNNGGTTYNQKFEDKATLTVDKSSSTAYMELRSLTSEDSAVYYCAAGWNFDYWGQGTTLTVSSASTKGPSVFPLAPSSKSTSGGTAALGCLVKDYFPEPVTVSWNSGALTSGVHTFPAVLQSSGLYSLSSVVTVPSSSLGTQTYICNVNHKPSNTKVDKKVEPKSCDKTHTCPPCPAPELLGGPSVFLFPPKPKDTLMISRTPEVTCVVVDVSHEDPEVKFNWYVDGVEVHNAKTKPREEQYNSTYRVVSVLTVLHQDWLNGKEYKCKVSNKALPAPIEKTISKAKGQPREPQVYTLPPSREEMTKNQVSLTCLVKGFYPSDIAVEWESNGQPENNYKTTPPVLDSDGSFFLYSKLTVDKSRWQQGNVFSCSVMHEALHNHYTQKSLSLSPGK

SEQ ID NO: 402 - protein, 115 aa, Artificial Sequence
  Description of Artificial Sequence: Synthetic polypeptide
EVQLQQSGPELVKPGTSVRISCKTSGYTFTEYTIHWVKQSHGKSLEWIGNINPNNGGTTYNQKFEDKATLTVDKSSSTAYMELRSLTSEDSAVYYCAAGWNFDYWGQGTTLTVSS

SEQ ID NO: 403 - protein, 8 aa, Artificial Sequence
  Description of Artificial Sequence: Synthetic peptide
GYTFTEYT

SEQ ID NO: 404 - protein, 8 aa, Artificial Sequence
  Description of Artificial Sequence: Synthetic peptide
INPNNGGT

SEQ ID NO: 405 - protein, 8 aa, Artificial Sequence
  Description of Artificial Sequence: Synthetic peptide
AAGWNFDY

SEQ ID NO: 406 - protein, 214 aa, Artificial Sequence; identical to SEQ ID NO: 133
  Description of Artificial Sequence: Synthetic polypeptide

SEQ ID NO: 407 - protein, 107 aa, Artificial Sequence; identical to SEQ ID NO: 134
  Description of Artificial Sequence: Synthetic polypeptide

SEQ ID NO: 408 - protein, 6 aa, Artificial Sequence
  Description of Artificial Sequence: Synthetic peptide
ENVVTY

SEQ ID NO: 409 - protein, 3 aa, Artificial Sequence
  Description of Artificial Sequence: Synthetic peptide
GAS

SEQ ID NO: 410 - protein, 9 aa, Artificial Sequence
  Description of Artificial Sequence: Synthetic peptide
GQGYSYPYT

SEQ ID NO: 411 - protein, 707 aa, Artificial Sequence
  Description of Artificial Sequence: Synthetic polypeptide
QVQLVQSGAEVKKPGASVKVSCKASGYTFTGYYMHWVRQAPGQGLEWMGWINPDSGGTNYAQKFQGRVTMTRDTSISTAYMELNRLRSDDTAVYYCARDQPLGYCTNGVCSYFDYWGQGTLVTVSSASTKGPSVFPLAPSSKSTSGGTAALGCLVKDYFPEPVTVSWNSGALTSGVHTFPAVLQSSGLYSLSSVVTVPSSSLGTQTYICNVNHKPSNTKVDKKVEPKSCDKTHTCPPCPAPELLGGPSVFLFPPKPKDTLMISRTPEVTCVVVDVSHEDPEVKFNWYVDGVEVHNAKTKPREEQYNSTYRVVSVLTVLHQDWLNGKEYKCKVSNKALPAPIEKTISKAKGQPREPQVYTLPPSREEMTKNQVSLTCLVKGFYPSDIAVEWESNGQPENNYKTTPPVLDSDGSFFLYSKLTVDKSRWQQGNVFSCSVMHEALHNHYTQKSLSLSPGGGGGSGGGGSEVQLQQSGPELVKPGTSVRISCKTSGYTFTEYTIHWVKQSHGKSLEWIGNINPNNGGTTYNQKFEDKATLTVDKSSSTAYMELRSLTSEDSAVYYCAAGWNFDYWGQGTTLTVSSGGGGSGGGGSGGGGSGGGGSNIVMTQSPKSMSMSVGERVTLTCKASENVVTYVSWYQQKPEQSPKLLIYGASNRYTGVPDRFTGSGSATDFTLTISSVQAEDLADYHCGQGYSYPYTFGGGTKLEIK

SEQ ID NO: 412 - protein, 707 aa, Artificial Sequence
  Description of Artificial Sequence: Synthetic polypeptide
EVQLQQSGPELVKPGTSVRISCKTSGYTFTEYTIHWVKQSHGKSLEWIGNINPNNGGTTYNQKFEDKATLTVDKSSSTAYMELRSLTSEDSAVYYCAAGWNFDYWGQGTTLTVSSASTKGPSVFPLAPSSKSTSGGTAALGCLVKDYFPEPVTVSWNSGALTSGVHTFPAVLQSSGLYSLSSVVTVPSSSLGTQTYICNVNHKPSNTKVDKKVEPKSCDKTHTCPPCPAPELLGGPSVFLFPPKPKDTLMISRTPEVTCVVVDVSHEDPEVKFNWYVDGVEVHNAKTKPREEQYNSTYRVVSVLTVLHQDWLNGKEYKCKVSNKALPAPIEKTISKAKGQPREPQVYTLPPSREEMTKNQVSLTCLVKGFYPSDIAVEWESNGQPENNYKTTPPVLDSDGSFFLYSKLTVDKSRWQQGNVFSCSVMHEALHNHYTQKSLSLSPGGGGGSGGGGSQVQLVQSGAEVKKPGASVKVSCKASGYTFTGYYMHWVRQAPGQGLEWMGWINPDSGGTNYAQKFQGRVTMTRDTSISTAYMELNRLRSDDTAVYYCARDQPLGYCTNGVCSYFDYWGQGTLVTVSSGGGGSGGGGSGGGGSGGGGSDIQMTQSPSSVSASVGDRVTITCRASQGIYSWLAWYQQKPGKAPNLLIYTASTLQSGVPSRFSGSGSGTDFTLTISSLQPEDFATYYCQQANIFPLTFGGGTKVEIK

SEQ ID NO: 413 - protein, 477 aa, Artificial Sequence; identical to SEQ ID NO: 140
  Description of Artificial Sequence: Synthetic polypeptide

SEQ ID NO: 414 - protein, 447 aa, Artificial Sequence
  Description of Artificial Sequence: Synthetic polypeptide
QVQLVQSGAEVKKPGASVKVSCKASGYTFTNYGMNWVRQAPGQGLEWMGWINTYTGEPTYADDFKGRVTMTTDTSTSTAYMELRSLRSDDTAVYYCARIGDSSPSDYWGQGTLVTVSSASTKGPSVFPLAPSSKSTSGGTAALGCLVKDYFPEPVTVSWNSGALTSGVHTFPAVLQSSGLYSLSSVVTVPSSSLGTQTYICNVNHKPSNTKVDKKVEPKSCDKTHTCPPCPAPELLGGPSVFLFPPKPKDTLMISRTPEVTCVVVDVSHEDPEVKFNWYVDGVEVHNAKTKPREEQYNSTYRVVSVLTVLHQDWLNGKEYKCKVSNKALPAPIEKTISKAKGQPREPQVYTLPPSRDELTKNQVSLTCLVKGFYPSDIAVEWESNGQPENNYKTTPPVLDSDGSFFLYSKLTVDKSRWQQGNVFSCSVMHEALHNHYTQKSLSLSPG

SEQ ID NO: 415 - protein, 118 aa, Artificial Sequence
  Description of Artificial Sequence: Synthetic polypeptide
QVQLVQSGAEVKKPGASVKVSCKASGYTFTNYGMNWVRQAPGQGLEWMGWINTYTGEPTYADDFKGRVTMTTDTSTSTAYMELRSLRSDDTAVYYCARIGDSSPSDYWGQGTLVTVSS

SEQ ID NO: 416 - protein, 8 aa, Artificial Sequence
  Description of Artificial Sequence: Synthetic peptide
GYTFTNYG

SEQ ID NO: 417 - protein, 8 aa, Artificial Sequence
  Description of Artificial Sequence: Synthetic peptide
INTYTGEP

SEQ ID NO: 418 - protein, 11 aa, Artificial Sequence
  Description of Artificial Sequence: Synthetic peptide
ARIGDSSPSDY

SEQ ID NO: 419 - protein, 214 aa, Artificial Sequence
  Description of Artificial Sequence: Synthetic polypeptide
EIVMTQSPATLSVSPGERATLSCKASQSVSNDVVWYQQKPGQAPRLLIYYASNRYTGIPARFSGSGSGTEFTLTISSLQSEDFAVYYCQQDYTSPWTFGQGTKLEIKRTVAAPSVFIFPPSDEQLKSGTASVVCLLNNFYPREAKVQWKVDNALQSGNSQESVTEQDSKDSTYSLSSTLTLSKADYEKHKVYACEVTHQGLSSPVTKSFNRGEC

SEQ ID NO: 420 - protein, 107 aa, Artificial Sequence
  Description of Artificial Sequence: Synthetic polypeptide
EIVMTQSPATLSVSPGERATLSCKASQSVSNDVVWYQQKPGQAPRLLIYYASNRYTGIPARFSGSGSGTEFTLTISSLQSEDFAVYYCQQDYTSPWTFGQGTKLEIK

SEQ ID NO: 421 - protein, 6 aa, Artificial Sequence
  Description of Artificial Sequence: Synthetic peptide
QSVSND

SEQ ID NO: 422 - protein, 3 aa, Artificial Sequence
  Description of Artificial Sequence: Synthetic peptide
YAS

SEQ ID NO: 423 - protein, 9 aa, Artificial Sequence
  Description of Artificial Sequence: Synthetic peptide
QQDYTSPWT

SEQ ID NO: 424 - protein, 710 aa, Artificial Sequence
  Description of Artificial Sequence: Synthetic polypeptide
QVQLVQSGAEVKKPGASVKVSCKASGYTFTGYYMHWVRQAPGQGLEWMGWINPDSGGTNYAQKFQGRVTMTRDTSISTAYMELNRLRSDDTAVYYCARDQPLGYCTNGVCSYFDYWGQGTLVTVSSASTKGPSVFPLAPSSKSTSGGTAALGCLVKDYFPEPVTVSWNSGALTSGVHTFPAVLQSSGLYSLSSVVTVPSSSLGTQTYICNVNHKPSNTKVDKKVEPKSCDKTHTCPPCPAPELLGGPSVFLFPPKPKDTLMISRTPEVTCVVVDVSHEDPEVKFNWYVDGVEVHNAKTKPREEQYNSTYRVVSVLTVLHQDWLNGKEYKCKVSNKALPAPIEKTISKAKGQPREPQVYTLPPSREEMTKNQVSLTCLVKGFYPSDIAVEWESNGQPENNYKTTPPVLDSDGSFFLYSKLTVDKSRWQQGNVFSCSVMHEALHNHYTQKSLSLSPGGGGGSGGGGSQVQLVQSGAEVKKPGASVKVSCKASGYTFTNYGMNWVRQAPGQGLEWMGWINTYTGEPTYADDFKGRVTMTTDTSTSTAYMELRSLRSDDTAVYYCARIGDSSPSDYWGQGTLVTVSSGGGGSGGGGSGGGGSGGGGSEIVMTQSPATLSVSPGERATLSCKASQSVSNDVVWYQQKPGQAPRLLIYYASNRYTGIPARFSGSGSGTEFTLTISSLQSEDFAVYYCQQDYTSPWTFGQGTKLEIK

SEQ ID NO: 425 - protein, 710 aa, Artificial Sequence
  Description of Artificial Sequence: Synthetic polypeptide
QVQLVQSGAEVKKPGASVKVSCKASGYTFTNYGMNWVRQAPGQGLEWMGWINTYTGEPTYADDFKGRVTMTTDTSTSTAYMELRSLRSDDTAVYYCARIGDSSPSDYWGQGTLVTVSSASTKGPSVFPLAPSSKSTSGGTAALGCLVKDYFPEPVTVSWNSGALTSGVHTFPAVLQSSGLYSLSSVVTVPSSSLGTQTYICNVNHKPSNTKVDKKVEPKSCDKTHTCPPCPAPELLGGPSVFLFPPKPKDTLMISRTPEVTCVVVDVSHEDPEVKFNWYVDGVEVHNAKTKPREEQYNSTYRVVSVLTVLHQDWLNGKEYKCKVSNKALPAPIEKTISKAKGQPREPQVYTLPPSREEMTKNQVSLTCLVKGFYPSDIAVEWESNGQPENNYKTTPPVLDSDGSFFLYSKLTVDKSRWQQGNVFSCSVMHEALHNHYTQKSLSLSPGGGGGSGGGGSQVQLVQSGAEVKKPGASVKVSCKASGYTFTGYYMHWVRQAPGQGLEWMGWINPDSGGTNYAQKFQGRVTMTRDTSISTAYMELNRLRSDDTAVYYCARDQPLGYCTNGVCSYFDYWGQGTLVTVSSGGGGSGGGGSGGGGSGGGGSDIQMTQSPSSVSASVGDRVTITCRASQGIYSWLAWYQQKPGKAPNLLIYTASTLQSGVPSRFSGSGSGTDFTLTISSLQPEDFATYYCQQANIFPLTFGGGTKVEIK

SEQ ID NO: 426 - protein, 477 aa, Artificial Sequence
  Description of Artificial Sequence: Synthetic polypeptide
EIVMTQSPATLSVSPGERATLSCKASQSVSNDVVWYQQKPGQAPRLLIYYASNRYTGIPARFSGSGSGTEFTLTISSLQSEDFAVYYCQQDYTSPWTFGQGTKLEIKRTVAAPSVFIFPPSDEQLKSGTASVVCLLNNFYPREAKVQWKVDNALQSGNSQESVTEQDSKDSTYSLSSTLTLSKADYEKHKVYACEVTHQGLSSPVTKSFNRGECGGGGSGGGGSQVQLVQSGAEVKKPGASVKVSCKASGYTFTGYYMHWVRQAPGQGLEWMGWINPDSGGTNYAQKFQGRVTMTRDTSISTAYMELNRLRSDDTAVYYCARDQPLGYCTNGVCSYFDYWGQGTLVTVSSGGGGSGGGGSGGGGSGGGGSDIQMTQSPSSVSASVGDRVTITCRASQGIYSWLAWYQQKPGKAPNLLIYTASTLQSGVPSRFSGSGSGTDFTLTISSLQPEDFATYYCQQANIFPLTFGGGTKVEIK

SEQ ID NO: 427 - protein, 449 aa, Artificial Sequence
  Description of Artificial Sequence: Synthetic polypeptide
QVQLVQSGPEVKKPGASVKVSCKASGYTFTDYAVHWVRQAPGKRLEWIGVISTYNDYTYNNQDFKGRVTMTRDTSASTAYMELSRLRSEDTAVYYCARGNSYFYALDYWGQGTSVTVSSASTKGPSVFPLAPSSKSTSGGTAALGCLVKDYFPEPVTVSWNSGALTSGVHTFPAVLQSSGLYSLSSVVTVPSSSLGTQTYICNVNHKPSNTKVDKKVEPKSCDKTHTCPPCPAPELLGGPSVFLFPPKPKDTLMISRTPEVTCVVVDVSHEDPEVKFNWYVDGVEVHNAKTKPREEQYNSTYRVVSVLTVLHQDWLNGKEYKCKVSNKALPAPIEKTISKAKGQPREPQVYTLPPSREEMTKNQVSLTCLVKGFYPSDIAVEWESNGQPENNYKTTPPVLDSDGSFFLYSKLTVDKSRWQQGNVFSCSVMHEALHNHYTQKSLSLSPGK

SEQ ID NO: 428 - protein, 119 aa, Artificial Sequence
  Description of Artificial Sequence: Synthetic polypeptide
QVQLVQSGPEVKKPGASVKVSCKASGYTFTDYAVHWVRQAPGKRLEWIGVISTYNDYTYNNQDFKGRVTMTRDTSASTAYMELSRLRSEDTAVYYCARGNSYFYALDYWGQGTSVTVSS

SEQ ID NO: 429 - protein, 8 aa, Artificial Sequence
  Description of Artificial Sequence: Synthetic peptide
GYTFTDYA

SEQ ID NO: 430 - protein, 8 aa, Artificial Sequence
  Description of Artificial Sequence: Synthetic peptide
ISTYNDYT

SEQ ID NO: 431 - protein, 12 aa, Artificial Sequence
  Description of Artificial Sequence: Synthetic peptide
ARGNSYFYALDY

SEQ ID NO: 432 - protein, 218 aa, Artificial Sequence
  Description of Artificial Sequence: Synthetic polypeptide
EIVLTQSPATLSLSPGERATLSCRASESVDSYGKSFMHWYQQKPGQAPRLLIYRASNLESGIPARFSGSGSGTDFTLTISSLEPEDFAVYYCQQSNEDPWTFGGGTKLEIKRTVAAPSVFIFPPSDEQLKSGTASVVCLLNNFYPREAKVQWKVDNALQSGNSQESVTEQDSKDSTYSLSSTLTLSKADYEKHKVYACEVTHQGLSSPVTKSFNRGEC

SEQ ID NO: 433 - protein, 111 aa, Artificial Sequence
  Description of Artificial Sequence: Synthetic polypeptide
EIVLTQSPATLSLSPGERATLSCRASESVDSYGKSFMHWYQQKPGQAPRLLIYRASNLESGIPARFSGSGSGTDFTLTISSLEPEDFAVYYCQQSNEDPWTFGGGTKLEIK

SEQ ID NO: 434 - protein, 10 aa, Artificial Sequence
  Description of Artificial Sequence: Synthetic peptide
ESVDSYGKSF

SEQ ID NO: 435 - protein, 3 aa, Artificial Sequence
  Description of Artificial Sequence: Synthetic peptide
RAS

SEQ ID NO: 436 - protein, 9 aa, Artificial Sequence
  Description of Artificial Sequence: Synthetic peptide
QQSNEDPWT

SEQ ID NO: 437 - protein, 715 aa, Artificial Sequence
  Description of Artificial Sequence: Synthetic polypeptide
QVQLVQSGAEVKKPGASVKVSCKASGYTFTGYYMHWVRQAPGQGLEWMGWINPDSGGTNYAQKFQGRVTMTRDTSISTAYMELNRLRSDDTAVYYCARDQPLGYCTNGVCSYFDYWGQGTLVTVSSASTKGPSVFPLAPSSKSTSGGTAALGCLVKDYFPEPVTVSWNSGALTSGVHTFPAVLQSSGLYSLSSVVTVPSSSLGTQTYICNVNHKPSNTKVDKKVEPKSCDKTHTCPPCPAPELLGGPSVFLFPPKPKDTLMISRTPEVTCVVVDVSHEDPEVKFNWYVDGVEVHNAKTKPREEQYNSTYRVVSVLTVLHQDWLNGKEYKCKVSNKALPAPIEKTISKAKGQPREPQVYTLPPSREEMTKNQVSLTCLVKGFYPSDIAVEWESNGQPENNYKTTPPVLDSDGSFFLYSKLTVDKSRWQQGNVFSCSVMHEALHNHYTQKSLSLSPGGGGGSGGGGSQVQLVQSGPEVKKPGASVKVSCKASGYTFTDYAVHWVRQAPGKRLEWIGVISTYNDYTYNNQDFKGRVTMTRDTSASTAYMELSRLRSEDTAVYYCARGNSYFYALDYWGQGTSVTVSSGGGGSGGGGSGGGGSGGGGSEIVLTQSPATLSLSPGERATLSCRASESVDSYGKSFMHWYQQKPGQAPRLLIYRASNLESGIPARFSGSGSGTDFTLTISSLEPEDFAVYYCQQSNEDPWTFGGGTKLEIK

SEQ ID NO: 438 - protein, 711 aa, Artificial Sequence
  Description of Artificial Sequence: Synthetic polypeptide
QVQLVQSGPEVKKPGASVKVSCKASGYTFTDYAVHWVRQAPGKRLEWIGVISTYNDYTYNNQDFKGRVTMTRDTSASTAYMELSRLRSEDTAVYYCARGNSYFYALDYWGQGTSVTVSSASTKGPSVFPLAPSSKSTSGGTAALGCLVKDYFPEPVTVSWNSGALTSGVHTFPAVLQSSGLYSLSSVVTVPSSSLGTQTYICNVNHKPSNTKVDKKVEPKSCDKTHTCPPCPAPELLGGPSVFLFPPKPKDTLMISRTPEVTCVVVDVSHEDPEVKFNWYVDGVEVHNAKTKPREEQYNSTYRVVSVLTVLHQDWLNGKEYKCKVSNKALPAPIEKTISKAKGQPREPQVYTLPPSREEMTKNQVSLTCLVKGFYPSDIAVEWESNGQPENNYKTTPPVLDSDGSFFLYSKLTVDKSRWQQGNVFSCSVMHEALHNHYTQKSLSLSPGGGGGSGGGGSQVQLVQSGAEVKKPGASVKVSCKASGYTFTGYYMHWVRQAPGQGLEWMGWINPDSGGTNYAQKFQGRVTMTRDTSISTAYMELNRLRSDDTAVYYCARDQPLGYCTNGVCSYFDYWGQGTLVTVSSGGGGSGGGGSGGGGSGGGGSDIQMTQSPSSVSASVGDRVTITCRASQGIYSWLAWYQQKPGKAPNLLIYTASTLQSGVPSRFSGSGSGTDFTLTISSLQPEDFATYYCQQANIFPLTFGGGTKVEIK

SEQ ID NO: 439 - protein, 481 aa, Artificial Sequence
  Description of Artificial Sequence: Synthetic polypeptide
EIVLTQSPATLSLSPGERATLSCRASESVDSYGKSFMHWYQQKPGQAPRLLIYRASNLESGIPARFSGSGSGTDFTLTISSLEPEDFAVYYCQQSNEDPWTFGGGTKLEIKRTVAAPSVFIFPPSDEQLKSGTASVVCLLNNFYPREAKVQWKVDNALQSGNSQESVTEQDSKDSTYSLSSTLTLSKADYEKHKVYACEVTHQGLSSPVTKSFNRGECGGGGSGGGGSQVQLVQSGAEVKKPGASVKVSCKASGYTFTGYYMHWVRQAPGQGLEWMGWINPDSGGTNYAQKFQGRVTMTRDTSISTAYMELNRLRSDDTAVYYCARDQPLGYCTNGVCSYFDYWGQGTLVTVSSGGGGSGGGGSGGGGSGGGGSDIQMTQSPSSVSASVGDRVTITCRASQGIYSWLAWYQQKPGKAPNLLIYTASTLQSGVPSRFSGSGSGTDFTLTISSLQPEDFATYYCQQANIFPLTFGGGTKVEIK

SEQ ID NO: 440 - protein, 445 aa, Artificial Sequence
  Description of Artificial Sequence: Synthetic polypeptide
QVQLVESGGGVVQPGRSLRLSCAASGFTFSSYAFHWVRQAPGKGLEWVAVISYDGSIKYYADSVKGRFTISRDNSKNTLYLQMNSLRAEDTAVYYCARTYYFDYWGQGTLVTVSSASTKGPSVFPLAPSSKSTSGGTAALGCLVKDYFPEPVTVSWNSGALTSGVHTFPAVLQSSGLYSLSSVVTVPSSSLGTQTYICNVNHKPSNTKVDKKVEPKSCDKTHTCPPCPAPELLGGPSVFLFPPKPKDTLMISRTPEVTCVVVDVSHEDPEVKFNWYVDGVEVHNAKTKPREEQYNSTYRVVSVLTVLHQDWLNGKEYKCKVSNKALPAPIEKTISKAKGQPREPQVYTLPPSREEMTKNQVSLTCLVKGFYPSDIAVEWESNGQPENNYKTTPPVLDSDGSFFLYSKLTVDKSRWQQGNVFSCSVMHEALHNHYTQKSLSLSPGK

SEQ ID NO: 441 - protein, 115 aa, Artificial Sequence
  Description of Artificial Sequence: Synthetic polypeptide
QVQLVESGGGVVQPGRSLRLSCAASGFTFSSYAFHWVRQAPGKGLEWVAVISYDGSIKYYADSVKGRFTISRDNSKNTLYLQMNSLRAEDTAVYYCARTYYFDYWGQGTLVTVSS

SEQ ID NO: 442 - protein, 8 aa, Artificial Sequence
  Description of Artificial Sequence: Synthetic peptide
GFTFSSYA

SEQ ID NO: 443 - protein, 8 aa, Artificial Sequence
  Description of Artificial Sequence: Synthetic peptide
ISYDGSIK

SEQ ID NO: 444 - protein, 8 aa, Artificial Sequence
  Description of Artificial Sequence: Synthetic peptide
ARTYYFDY

SEQ ID NO: 445 - protein, 214 aa, Artificial Sequence
  Description of Artificial Sequence: Synthetic polypeptide
EIVLTQSPDFQSVTPKEKVTITCRASQSIGSSLHWYQQKPDQSPKLLIKYASQSFSGVPSRFSGSGSGTDFTLTINSLEAEDAAAYYCHQSSSLPITFGQGTRLEIKRTVAAPSVFIFPPSDEQLKSGTASVVCLLNNFYPREAKVQWKVDNALQSGNSQESVTEQDSKDSTYSLSSTLTLSKADYEKHKVYACEVTHQGLSSPVTKSFNRGEC

SEQ ID NO: 446 - protein, 107 aa, Artificial Sequence
  Description of Artificial Sequence: Synthetic polypeptide
EIVLTQSPDFQSVTPKEKVTITCRASQSIGSSLHWYQQKPDQSPKLLIKYASQSFSGVPSRFSGSGSGTDFTLTINSLEAEDAAAYYCHQSSSLPITFGQGTRLEIK

SEQ ID NO: 447 - protein, 6 aa, Artificial Sequence
  Description of Artificial Sequence: Synthetic peptide
QSIGSS

SEQ ID NO: 448 - protein, 3 aa, Artificial Sequence
  Description of Artificial Sequence: Synthetic peptide
YAS

SEQ ID NO: 449 - protein, 9 aa, Artificial Sequence
  Description of Artificial Sequence: Synthetic peptide
HQSSSLPIT

SEQ ID NO: 450 - protein, 707 aa, Artificial Sequence
  Description of Artificial Sequence: Synthetic polypeptide
QVQLVQSGAEVKKPGASVKVSCKASGYTFTGYYMHWVRQAPGQGLEWMGWINPDSGGTNYAQKFQGRVTMTRDTSISTAYMELNRLRSDDTAVYYCARDQPLGYCTNGVCSYFDYWGQGTLVTVSSASTKGPSVFPLAPSSKSTSGGTAALGCLVKDYFPEPVTVSWNSGALTSGVHTFPAVLQSSGLYSLSSVVTVPSSSLGTQTYICNVNHKPSNTKVDKKVEPKSCDKTHTCPPCPAPELLGGPSVFLFPPKPKDTLMISRTPEVTCVVVDVSHEDPEVKFNWYVDGVEVHNAKTKPREEQYNSTYRVVSVLTVLHQDWLNGKEYKCKVSNKALPAPIEKTISKAKGQPREPQVYTLPPSREEMTKNQVSLTCLVKGFYPSDIAVEWESNGQPENNYKTTPPVLDSDGSFFLYSKLTVDKSRWQQGNVFSCSVMHEALHNHYTQKSLSLSPGGGGGSGGGGSQVQLVESGGGVVQPGRSLRLSCAASGFTFSSYAFHWVRQAPGKGLEWVAVISYDGSIKYYADSVKGRFTISRDNSKNTLYLQMNSLRAEDTAVYYCARTYYFDYWGQGTLVTVSSGGGGSGGGGSGGGGSGGGGSEIVLTQSPDFQSVTPKEKVTITCRASQSIGSSLHWYQQKPDQSPKLLIKYASQSFSGVPSRFSGSGSGTDFTLTINSLEAEDAAAYYCHQSSSLPITFGQGTRLEIK

SEQ ID NO: 451 - protein, 707 aa, Artificial Sequence
  Description of Artificial Sequence: Synthetic polypeptide
QVQLVESGGGVVQPGRSLRLSCAASGFTFSSYAFHWVRQAPGKGLEWVAVISYDGSIKYYADSVKGRFTISRDNSKNTLYLQMNSLRAEDTAVYYCARTYYFDYWGQGTLVTVSSASTKGPSVFPLAPSSKSTSGGTAALGCLVKDYFPEPVTVSWNSGALTSGVHTFPAVLQSSGLYSLSSVVTVPSSSLGTQTYICNVNHKPSNTKVDKKVEPKSCDKTHTCPPCPAPELLGGPSVFLFPPKPKDTLMISRTPEVTCVVVDVSHEDPEVKFNWYVDGVEVHNAKTKPREEQYNSTYRVVSVLTVLHQDWLNGKEYKCKVSNKALPAPIEKTISKAKGQPREPQVYTLPPSREEMTKNQVSLTCLVKGFYPSDIAVEWESNGQPENNYKTTPPVLDSDGSFFLYSKLTVDKSRWQQGNVFSCSVMHEALHNHYTQKSLSLSPGGGGGSGGGGSQVQLVQSGAEVKKPGASVKVSCKASGYTFTGYYMHWVRQAPGQGLEWMGWINPDSGGTNYAQKFQGRVTMTRDTSISTAYMELNRLRSDDTAVYYCARDQPLGYCTNGVCSYFDYWGQGTLVTVSSGGGGSGGGGSGGGGSGGGGSDIQMTQSPSSVSASVGDRVTITCRASQGIYSWLAWYQQKPGKAPNLLIYTASTLQSGVPSRFSGSGSGTDFTLTISSLQPEDFATYYCQQANIFPLTFGGGTKVEIK

SEQ ID NO: 452 - protein, 477 aa, Artificial Sequence
  Description of Artificial Sequence: Synthetic polypeptide
EIVLTQSPDFQSVTPKEKVTITCRASQSIGSSLHWYQQKPDQSPKLLIKYASQSFSGVPSRFSGSGSGTDFTLTINSLEAEDAAAYYCHQSSSLPITFGQGTRLEIKRTVAAPSVFIFPPSDEQLKSGTASVVCLLNNFYPREAKVQWKVDNALQSGNSQESVTEQDSKDSTYSLSSTLTLSKADYEKHKVYACEVTHQGLSSPVTKSFNRGECGGGGSGGGGSQVQLVQSGAEVKKPGASVKVSCKASGYTFTGYYMHWVRQAPGQGLEWMGWINPDSGGTNYAQKFQGRVTMTRDTSISTAYMELNRLRSDDTAVYYCARDQPLGYCTNGVCSYFDYWGQGTLVTVSSGGGGSGGGGSGGGGSGGGGSDIQMTQSPSSVSASVGDRVTITCRASQGIYSWLAWYQQKPGKAPNLLIYTASTLQSGVPSRFSGSGSGTDFTLTISSLQPEDFATYYCQQANIFPLTFGGGTKVEIK

SEQ ID NO: 453 - protein, 450 aa, Artificial Sequence
  Description of Artificial Sequence: Synthetic polypeptide
QVQLVQSGAEVKKPGASVKVSCKASGLTIEDYYMHWVRQAPGQGLEWMGWIDPENGDTEYGPKFQGRVTMTRDTSINTAYMELSRLRSDDTAVYYCAVHNAHYGTWFAYWGQGTLVTVSSASTKGPSVFPLAPSSKSTSGGTAALGCLVKDYFPEPVTVSWNSGALTSGVHTFPAVLQSSGLYSLSSVVTVPSSSLGTQTYICNVNHKPSNTKVDKKVEPKSCDKTHTCPPCPAPELLGGPSVFLFPPKPKDTLMISRTPEVTCVVVDVSHEDPEVKFNWYVDGVEVHNAKTKPREEQYNSTYRVVSVLTVLHQDWLNGKEYKCKVSNKALPAPIEKTISKAKGQPREPQVYTLPPSREEMTKNQVSLTCLVKGFYPSDIAVEWESNGQPENNYKTTPPVLDSDGSFFLYSKLTVDKSRWQQGNVFSCSVMHEALHNHYTQKSLSLSPGK

SEQ ID NO: 454 - protein, 120 aa, Artificial Sequence
  Description of Artificial Sequence: Synthetic polypeptide
QVQLVQSGAEVKKPGASVKVSCKASGLTIEDYYMHWVRQAPGQGLEWMGWIDPENGDTEYGPKFQGRVTMTRDTSINTAYMELSRLRSDDTAVYYCAVHNAHYGTWFAYWGQGTLVTVSS

SEQ ID NO: 455 - protein, 8 aa, Artificial Sequence
  Description of Artificial Sequence: Synthetic peptide
GLTIEDYY

SEQ ID NO: 456 - protein, 8 aa, Artificial Sequence
  Description of Artificial Sequence: Synthetic peptide
IDPENGDT

SEQ ID NO: 457 - protein, 13 aa, Artificial Sequence
  Description of Artificial Sequence: Synthetic peptide
AVHNAHYGTWFAY

SEQ ID NO: 458 - protein, 219 aa, Artificial Sequence
  Description of Artificial Sequence: Synthetic polypeptide
DVVMTQSPLSLPVTLGQPASISCRSSQSLLHSSGNTYLEYFQQRPGQSPRPLIYKISTRFSGVPDRFSGSGSGTDFTLKISRVEAEDVGVYYCFQGSHVPYTFGGGTKVEIKRTVAAPSVFIFPPSDEQLKSGTASVVCLLNNFYPREAKVQWKVDNALQSGNSQESVTEQDSKDSTYSLSSTLTLSKADYEKHKVYACEVTHQGLSSPVTKSFNRGEC

SEQ ID NO: 459 - protein, 112 aa, Artificial Sequence
  Description of Artificial Sequence: Synthetic polypeptide
DVVMTQSPLSLPVTLGQPASISCRSSQSLLHSSGNTYLEYFQQRPGQSPRPLIYKISTRFSGVPDRFSGSGSGTDFTLKISRVEAEDVGVYYCFQGSHVPYTFGGGTKVEIK

SEQ ID NO: 460 - protein, 11 aa, Artificial Sequence
  Description of Artificial Sequence: Synthetic peptide
QSLLHSSGNTY

SEQ ID NO: 461 - protein, 3 aa, Artificial Sequence
  Description of Artificial Sequence: Synthetic peptide
KIS

SEQ ID NO: 462 - protein, 9 aa, Artificial Sequence
  Description of Artificial Sequence: Synthetic peptide
FQGSHVPYT

SEQ ID NO: 463 - protein, 717 aa, Artificial Sequence
  Description of Artificial Sequence: Synthetic polypeptide
QVQLVQSGAEVKKPGASVKVSCKASGYTFTGYYMHWVRQAPGQGLEWMGWINPDSGGTNYAQKFQGRVTMTRDTSISTAYMELNRLRSDDTAVYYCARDQPLGYCTNGVCSYFDYWGQGTLVTVSSASTKGPSVFPLAPSSKSTSGGTAALGCLVKDYFPEPVTVSWNSGALTSGVHTFPAVLQSSGLYSLSSVVTVPSSSLGTQTYICNVNHKPSNTKVDKKVEPKSCDKTHTCPPCPAPELLGGPSVFLFPPKPKDTLMISRTPEVTCVVVDVSHEDPEVKFNWYVDGVEVHNAKTKPREEQYNSTYRVVSVLTVLHQDWLNGKEYKCKVSNKALPAPIEKTISKAKGQPREPQVYTLPPSREEMTKNQVSLTCLVKGFYPSDIAVEWESNGQPENNYKTTPPVLDSDGSFFLYSKLTVDKSRWQQGNVFSCSVMHEALHNHYTQKSLSLSPGGGGGSGGGGSQVQLVQSGAEVKKPGASVKVSCKASGLTIEDYYMHWVRQAPGQGLEWMGWIDPENGDTEYGPKFQGRVTMTRDTSINTAYMELSRLRSDDTAVYYCAVHNAHYGTWFAYWGQGTLVTVSSGGGGSGGGGSGGGGSGGGGSDVVMTQSPLSLPVTLGQPASISCRSSQSLLHSSGNTYLEYFQQRPGQSPRPLIYKISTRFSGVPDRFSGSGSGTDFTLKISRVEAEDVGVYYCFQGSHVPYTFGGGTKVEIK

SEQ ID NO: 464 - protein, 712 aa, Artificial Sequence
  Description of Artificial Sequence: Synthetic polypeptide
QVQLVQSGAEVKKPGASVKVSCKASGLTIEDYYMHWVRQAPGQGLEWMGWIDPENGDTEYGPKFQGRVTMTRDTSINTAYMELSRLRSDDTAVYYCAVHNAHYGTWFAYWGQGTLVTVSSASTKGPSVFPLAPSSKSTSGGTAALGCLVKDYFPEPVTVSWNSGALTSGVHTFPAVLQSSGLYSLSSVVTVPSSSLGTQTYICNVNHKPSNTKVDKKVEPKSCDKTHTCPPCPAPELLGGPSVFLFPPKPKDTLMISRTPEVTCVVVDVSHEDPEVKFNWYVDGVEVHNAKTKPREEQYNSTYRVVSVLTVLHQDWLNGKEYKCKVSNKALPAPIEKTISKAKGQPREPQVYTLPPSREEMTKNQVSLTCLVKGFYPSDIAVEWESNGQPENNYKTTPPVLDSDGSFFLYSKLTVDKSRWQQGNVFSCSVMHEALHNHYTQKSLSLSPGGGGGSGGGGSQVQLVQSGAEVKKPGASVKVSCKASGYTFTGYYMHWVRQAPGQGLEWMGWINPDSGGTNYAQKFQGRVTMTRDTSISTAYMELNRLRSDDTAVYYCARDQPLGYCTNGVCSYFDYWGQGTLVTVSSGGGGSGGGGSGGGGSGGGGSDIQMTQSPSSVSASVGDRVTITCRASQGIYSWLAWYQQKPGKAPNLLIYTASTLQSGVPSRFSGSGSGTDFTLTISSLQPEDFATYYCQQANIFPLTFGGGTKVEIK

SEQ ID NO: 465 - protein, 482 aa, Artificial Sequence
  Description of Artificial Sequence: Synthetic polypeptide
DVVMTQSPLSLPVTLGQPASISCRSSQSLLHSSGNTYLEYFQQRPGQSPRPLIYKISTRFSGVPDRFSGSGSGTDFTLKISRVEAEDVGVYYCFQGSHVPYTFGGGTKVEIKRTVAAPSVFIFPPSDEQLKSGTASVVCLLNNFYPREAKVQWKVDNALQSGNSQESVTEQDSKDSTYSLSSTLTLSKADYEKHKVYACEVTHQGLSSPVTKSFNRGECGGGGSGGGGSQVQLVQSGAEVKKPGASVKVSCKASGYTFTGYYMHWVRQAPGQGLEWMGWINPDSGGTNYAQKFQGRVTMTRDTSISTAYMELNRLRSDDTAVYYCARDQPLGYCTNGVCSYFDYWGQGTLVTVSSGGGGSGGGGSGGGGSGGGGSDIQMTQSPSSVSASVGDRVTITCRASQGIYSWLAWYQQKPGKAPNLLIYTASTLQSGVPSRFSGSGSGTDFTLTISSLQPEDFATYYCQQANIFPLTFGGGTKVEIK

SEQ ID NO: 466 - protein, 446 aa, Artificial Sequence
  Description of Artificial Sequence: Synthetic polypeptide
QVQLQESGPGLVKPSQTLSLTCTVSGYAFTAYNIHWVRQAPGQGLEWMGSFDPYDGGSSYNQKFKDRLTISKDTSKNQVVLTMTNMDPVDTATYYCARGWYYFDYWGHGTLVTVSSASTKGPSVFPLAPSSKSTSGGTAALGCLVKDYFPEPVTVSWNSGALTSGVHTFPAVLQSSGLYSLSSVVTVPSSSLGTQTYICNVNHKPSNTKVDKKVEPKSCDKTHTCPPCPAPELLGGPSVFLFPPKPKDTLMISRTPEVTCVVVDVSHEDPEVKFNWYVDGVEVHNAKTKPREEQYNSTYRVVSVLTVLHQDWLNGKEYKCKVSNKALPAPIEKTISKAKGQPREPQVYTLPPSREEMTKNQVSLTCLVKGFYPSDIAVEWESNGQPENNYKTTPPVLDSDGSFFLYSKLTVDKSRWQQGNVFSCSVMHEALHNHYTQKSLSLSPGK

SEQ ID NO: 467 - protein, 116 aa, Artificial Sequence
  Description of Artificial Sequence: Synthetic polypeptide
QVQLQESGPGLVKPSQTLSLTCTVSGYAFTAYNIHWVRQAPGQGLEWMGSFDPYDGGSSYNQKFKDRLTISKDTSKNQVVLTMTNMDPVDTATYYCARGWYYFDYWGHGTLVTVSS

SEQ ID NO: 468 - protein, 8 aa, Artificial Sequence
  Description of Artificial Sequence: Synthetic peptide
GYAFTAYN

SEQ ID NO: 469 - protein, 8 aa, Artificial Sequence
  Description of Artificial Sequence: Synthetic peptide
FDPYDGGS

SEQ ID NO: 470 - protein, 9 aa, Artificial Sequence
  Description of Artificial Sequence: Synthetic peptide
ARGWYYFDY

SEQ ID NO: 471 - protein, 214 aa, Artificial Sequence
  Description of Artificial Sequence: Synthetic polypeptide
DIVMTQTPLSLPVTPGEPASISCRASKSISKYLAWYQQKPGQAPRLLIYSGSTLQSGIPPRFSGSGYGTDFTLTINNIESEDAAYYFCQQHDESPYTFGEGTKVEIKRTVAAPSVFIFPPSDEQLKSGTASVVCLLNNFYPREAKVQWKVDNALQSGNSQESVTEQDSKDSTYSLSSTLTLSKADYEKHKVYACEVTHQGLSSPVTKSFNRGEC

SEQ ID NO: 472 - protein, 107 aa, Artificial Sequence
  Description of Artificial Sequence: Synthetic polypeptide
DIVMTQTPLSLPVTPGEPASISCRASKSISKYLAWYQQKPGQAPRLLIYSGSTLQSGIPPRFSGSGYGTDFTLTINNIESEDAAYYFCQQHDESPYTFGEGTKVEIK

SEQ ID NO: 473 - protein, 6 aa, Artificial Sequence
  Description of Artificial Sequence: Synthetic peptide
KSISKY

SEQ ID NO: 474 - protein, 3 aa, Artificial Sequence
  Description of Artificial Sequence: Synthetic peptide
SGS

SEQ ID NO: 475 - protein, 9 aa, Artificial Sequence
  Description of Artificial Sequence: Synthetic peptide
QQHDESPYT

SEQ ID NO: 476 - protein, 708 aa, Artificial Sequence
  Description of Artificial Sequence: Synthetic polypeptide
QVQLVQSGAEVKKPGASVKVSCKASGYTFTGYYMHWVRQAPGQGLEWMGWINPDSGGTNYAQKFQGRVTMTRDTSISTAYMELNRLRSDDTAVYYCARDQPLGYCTNGVCSYFDYWGQGTLVTVSSASTKGPSVFPLAPSSKSTSGGTAALGCLVKDYFPEPVTVSWNSGALTSGVHTFPAVLQSSGLYSLSSVVTVPSSSLGTQTYICNVNHKPSNTKVDKKVEPKSCDKTHTCPPCPAPELLGGPSVFLFPPKPKDTLMISRTPEVTCVVVDVSHEDPEVKFNWYVDGVEVHNAKTKPREEQYNSTYRVVSVLTVLHQDWLNGKEYKCKVSNKALPAPIEKTISKAKGQPREPQVYTLPPSREEMTKNQVSLTCLVKGFYPSDIAVEWESNGQPENNYKTTPPVLDSDGSFFLYSKLTVDKSRWQQGNVFSCSVMHEALHNHYTQKSLSLSPGGGGGSGGGGSQVQLQESGPGLVKPSQTLSLTCTVSGYAFTAYNIHWVRQAPGQGLEWMGSFDPYDGGSSYNQKFKDRLTISKDTSKNQVVLTMTNMDPVDTATYYCARGWYYFDYWGHGTLVTVSSGGGGSGGGGSGGGGSGGGGSDIVMTQTPLSLPVTPGEPASISCRASKSISKYLAWYQQKPGQAPRLLIYSGSTLQSGIPPRFSGSGYGTDFTLTINNIESEDAAYYFCQQHDESPYTFGEGTKVEIK

SEQ ID NO: 477 - protein, 708 aa, Artificial Sequence
  Description of Artificial Sequence: Synthetic polypeptide
QVQLQESGPGLVKPSQTLSLTCTVSGYAFTAYNIHWVRQAPGQGLEWMGSFDPYDGGSSYNQKFKDRLTISKDTSKNQVVLTMTNMDPVDTATYYCARGWYYFDYWGHGTLVTVSSASTKGPSVFPLAPSSKSTSGGTAALGCLVKDYFPEPVTVSWNSGALTSGVHTFPAVLQSSGLYSLSSVVTVPSSSLGTQTYICNVNHKPSNTKVDKKVEPKSCDKTHTCPPCPAPELLGGPSVFLFPPKPKDTLMISRTPEVTCVVVDVSHEDPEVKFNWYVDGVEVHNAKTKPREEQYNSTYRVVSVLTVLHQDWLNGKEYKCKVSNKALPAPIEKTISKAKGQPREPQVYTLPPSREEMTKNQVSLTCLVKGFYPSDIAVEWESNGQPENNYKTTPPVLDSDGSFFLYSKLTVDKSRWQQGNVFSCSVMHEALHNHYTQKSLSLSPGGGGGSGGGGSQVQLVQSGAEVKKPGASVKVSCKASGYTFTGYYMHWVRQAPGQGLEWMGWINPDSGGTNYAQKFQGRVTMTRDTSISTAYMELNRLRSDDTAVYYCARDQPLGYCTNGVCSYFDYWGQGTLVTVSSGGGGSGGGGSGGGGSGGGGSDIQMTQSPSSVSASVGDRVTITCRASQGIYSWLAWYQQKPGKAPNLLIYTASTLQSGVPSRFSGSGSGTDFTLTISSLQPEDFATYYCQQANIFPLTFGGGTKVEIK

SEQ ID NO: 478 - protein, 477 aa, Artificial Sequence
  Description of Artificial Sequence: Synthetic polypeptide
DIVMTQTPLSLPVTPGEPASISCRASKSISKYLAWYQQKPGQAPRLLIYSGSTLQSGIPPRFSGSGYGTDFTLTINNIESEDAAYYFCQQHDESPYTFGEGTKVEIKRTVAAPSVFIFPPSDEQLKSGTASVVCLLNNFYPREAKVQWKVDNALQSGNSQESVTEQDSKDSTYSLSSTLTLSKADYEKHKVYACEVTHQGLSSPVTKSFNRGECGGGGSGGGGSQVQLVQSGAEVKKPGASVKVSCKASGYTFTGYYMHWVRQAPGQGLEWMGWINPDSGGTNYAQKFQGRVTMTRDTSISTAYMELNRLRSDDTAVYYCARDQPLGYCTNGVCSYFDYWGQGTLVTVSSGGGGSGGGGSGGGGSGGGGSDIQMTQSPSSVSASVGDRVTITCRASQGIYSWLAWYQQKPGKAPNLLIYTASTLQSGVPSRFSGSGSGTDFTLTISSLQPEDFATYYCQQANIFPLTFGGGTKVEIK

SEQ ID NO: 479 - protein, 450 aa, Artificial Sequence
  Description of Artificial Sequence: Synthetic polypeptide
QVQLVESGGGVVQPGRSLRLSCTASGFRFRSHGMHWVRQAPGKGLEWVAVISYDGNNKLYADSVKGRITISRDNSKNTLFLQMNNVRAEDTAVYYCASPYTSDWQYFQYWGQGTLVIVSSASTKGPSVFPLAPSSKSTSGGTAALGCLVKDYFPEPVTVSWNSGALTSGVHTFPAVLQSSGLYSLSSVVTVPSSSLGTQTYICNVNHKPSNTKVDKKVEPKSCDKTHTCPPCPAPELLGGPSVFLFPPKPKDTLMISRTPEVTCVVVDVSHEDPEVKFNWYVDGVEVHNAKTKPREEQYNSTYRVVSVLTVLHQDWLNGKEYKCKVSNKALPAPIEKTISKAKGQPREPQVYTLPPSREEMTKNQVSLTCLVKGFYPSDIAVEWESNGQPENNYKTTPPVLDSDGSFFLYSKLTVDKSRWQQGNVFSCSVMHEALHNHYTQKSLSLSPGK

SEQ ID NO: 480 - protein, 120 aa, Artificial Sequence
  Description of Artificial Sequence: Synthetic polypeptide
QVQLVESGGGVVQPGRSLRLSCTASGFRFRSHGMHWVRQAPGKGLEWVAVISYDGNNKLYADSVKGRITISRDNSKNTLFLQMNNVRAEDTAVYYCASPYTSDWQYFQYWGQGTLVIVSS

SEQ ID NO: 481 - protein, 8 aa, Artificial Sequence
  Description of Artificial Sequence: Synthetic peptide
GFRFRSHG

SEQ ID NO: 482 - protein, 7 aa, Artificial Sequence
  Description of Artificial Sequence: Synthetic peptide
SYDGNNK

SEQ ID NO: 483 - protein, 13 aa, Artificial Sequence
  Description of Artificial Sequence: Synthetic peptide
ASPYTSDWQYFQY

SEQ ID NO: 484 - protein, 214 aa, Artificial Sequence
  Description of Artificial Sequence: Synthetic polypeptide
EIVMTQSPATLSVSPGERATFSCRASQNISTTLAWYQQKPGQAPRLLIYDTSTRATGIPARFSGSGSGTEFTLTISSLQSEDLAVYYCQQSNSWPLTFGGGTKVEIKRTVAAPSVFIFPPSDEQLKSGTASVVCLLNNFYPREAKVQWKVDNALQSGNSQESVTEQDSKDSTYSLSSTLTLSKADYEKHKVYACEVTHQGLSSPVTKSFNRGEC

SEQ ID NO: 485 - protein, 107 aa, Artificial Sequence
  Description of Artificial Sequence: Synthetic polypeptide
EIVMTQSPATLSVSPGERATFSCRASQNISTTLAWYQQKPGQAPRLLIYDTSTRATGIPARFSGSGSGTEFTLTISSLQSEDLAVYYCQQSNSWPLTFGGGTKVEIK

SEQ ID NO: 486 - protein, 6 aa, Artificial Sequence
  Description of Artificial Sequence: Synthetic peptide
QNISTT

SEQ ID NO: 487 - protein, 3 aa, Artificial Sequence
  Description of Artificial Sequence: Synthetic peptide
DTS

SEQ ID NO: 488 - protein, 9 aa, Artificial Sequence
  Description of Artificial Sequence: Synthetic peptide
QQSNSWPLT

SEQ ID NO: 489 - protein, 712 aa, Artificial Sequence
  Description of Artificial Sequence: Synthetic polypeptide
QVQLVQSGAEVKKPGASVKVSCKASGYTFTGYYMHWVRQAPGQGLEWMGWINPDSGGTNYAQKFQGRVTMTRDTSISTAYMELNRLRSDDTAVYYCARDQPLGYCTNGVCSYFDYWGQGTLVTVSSASTKGPSVFPLAPSSKSTSGGTAALGCLVKDYFPEPVTVSWNSGALTSGVHTFPAVLQSSGLYSLSSVVTVPSSSLGTQTYICNVNHKPSNTKVDKKVEPKSCDKTHTCPPCPAPELLGGPSVFLFPPKPKDTLMISRTPEVTCVVVDVSHEDPEVKFNWYVDGVEVHNAKTKPREEQYNSTYRVVSVLTVLHQDWLNGKEYKCKVSNKALPAPIEKTISKAKGQPREPQVYTLPPSREEMTKNQVSLTCLVKGFYPSDIAVEWESNGQPENNYKTTPPVLDSDGSFFLYSKLTVDKSRWQQGNVFSCSVMHEALHNHYTQKSLSLSPGGGGGSGGGGSQVQLVESGGGVVQPGRSLRLSCTASGFRFRSHGMHWVRQAPGKGLEWVAVISYDGNNKLYADSVKGRITISRDNSKNTLFLQMNNVRAEDTAVYYCASPYTSDWQYFQYWGQGTLVIVSSGGGGSGGGGSGGGGSGGGGSEIVMTQSPATLSVSPGERATFSCRASQNISTTLAWYQQKPGQAPRLLIYDTSTRATGIPARFSGSGSGTEFTLTISSLQSEDLAVYYCQQSNSWPLTFGGGTKVEIK

SEQ ID NO: 490 - protein, 712 aa, Artificial Sequence
  Description of Artificial Sequence: Synthetic polypeptide
QVQLVESGGGVVQPGRSLRLSCTASGFRFRSHGMHWVRQAPGKGLEWVAVISYDGNNKLYADSVKGRITISRDNSKNTLFLQMNNVRAEDTAVYYCASPYTSDWQYFQYWGQGTLVIVSSASTKGPSVFPLAPSSKSTSGGTAALGCLVKDYFPEPVTVSWNSGALTSGVHTFPAVLQSSGLYSLSSVVTVPSSSLGTQTYICNVNHKPSNTKVDKKVEPKSCDKTHTCPPCPAPELLGGPSVFLFPPKPKDTLMISRTPEVTCVVVDVSHEDPEVKFNWYVDGVEVHNAKTKPREEQYNSTYRVVSVLTVLHQDWLNGKEYKCKVSNKALPAPIEKTISKAKGQPREPQVYTLPPSREEMTKNQVSLTCLVKGFYPSDIAVEWESNGQPENNYKTTPPVLDSDGSFFLYSKLTVDKSRWQQGNVFSCSVMHEALHNHYTQKSLSLSPGGGGGSGGGGSQVQLVQSGAEVKKPGASVKVSCKASGYTFTGYYMHWVRQAPGQGLEWMGWINPDSGGTNYAQKFQGRVTMTRDTSISTAYMELNRLRSDDTAVYYCARDQPLGYCTNGVCSYFDYWGQGTLVTVSSGGGGSGGGGSGGGGSGGGGSDIQMTQSPSSVSASVGDRVTITCRASQGIYSWLAWYQQKPGKAPNLLIYTASTLQSGVPSRFSGSGSGTDFTLTISSLQPEDFATYYCQQANIFPLTFGGGTKVEIK

SEQ ID NO: 491 - protein, 477 aa, Artificial Sequence
  Description of Artificial Sequence: Synthetic polypeptide
EIVMTQSPATLSVSPGERATFSCRASQNISTTLAWYQQKPGQAPRLLIYDTSTRATGIPARFSGSGSGTEFTLTISSLQSEDLAVYYCQQSNSWPLTFGGGTKVEIKRTVAAPSVFIFPPSDEQLKSGTASVVCLLNNFYPREAKVQWKVDNALQSGNSQESVTEQDSKDSTYSLSSTLTLSKADYEKHKVYACEVTHQGLSSPVTKSFNRGECGGGGSGGGGSQVQLVQSGAEVKKPGASVKVSCKASGYTFTGYYMHWVRQAPGQGLEWMGWINPDSGGTNYAQKFQGRVTMTRDTSISTAYMELNRLRSDDTAVYYCARDQPLGYCTNGVCSYFDYWGQGTLVTVSSGGGGSGGGGSGGGGSGGGGSDIQMTQSPSSVSASVGDRVTITCRASQGIYSWLAWYQQKPGKAPNLLIYTASTLQSGVPSRFSGSGSGTDFTLTISSLQPEDFATYYCQQANIFPLTFGGGTKVEIK

SEQ ID NO: 492 - protein, 448 aa, Artificial Sequence
  Description of Artificial Sequence: Synthetic polypeptide
QVQLVQSGGGVVRPGGSLRLSCAASGFSFIDYGMSWVRQVPGKGLEWVAGMNWSGDKKGHAESVKGRFIISRDNAKNTLYLEMSSLRVEDTALYFCARGEYSNRFDPRGRGTLVTVSSASTKGPSVFPLAPSSKSTSGGTAALGCLVKDYFPEPVTVSWNSGALTSGVHTFPAVLQSSGLYSLSSVVTVPSSSLGTQTYICNVNHKPSNTKVDKKVEPKSCDKTHTCPPCPAPELLGGPSVFLFPPKPKDTLMISRTPEVTCVVVDVSHEDPEVKFNWYVDGVEVHNAKTKPREEQYNSTYRVVSVLTVLHQDWLNGKEYKCKVSNKALPAPIEKTISKAKGQPREPQVYTLPPSREEMTKNQVSLTCLVKGFYPSDIAVEWESNGQPENNYKTTPPVLDSDGSFFLYSKLTVDKSRWQQGNVFSCSVMHEALHNHYTQKSLSLSPGK

SEQ ID NO: 493 - protein, 118 aa, Artificial Sequence
  Description of Artificial Sequence: Synthetic polypeptide
QVQLVQSGGGVVRPGGSLRLSCAASGFSFIDYGMSWVRQVPGKGLEWVAGMNWSGDKKGHAESVKGRFIISRDNAKNTLYLEMSSLRVEDTALYFCARGEYSNRFDPRGRGTLVTVSS

SEQ ID NO: 494 - protein, 8 aa, Artificial Sequence
  Description of Artificial Sequence: Synthetic peptide
GFSFIDYG

SEQ ID NO: 495 - protein, 8 aa, Artificial Sequence
  Description of Artificial Sequence: Synthetic peptide
MNWSGDKK

SEQ ID NO: 496 - protein, 11 aa, Artificial Sequence
  Description of Artificial Sequence: Synthetic peptide
ARGEYSNRFDP

SEQ ID NO: 497 - protein, 219 aa, Artificial Sequence
  Description of Artificial Sequence: Synthetic polypeptide
DIVMTQTPLSLPVTLGQPASLSCRSSQSLVFTDGNTYLNWFQQRPGQSPRRLIYKVSSRDPGVPDRFSGTGSGTDFTLEISRVEAEDIGVYYCMQGTHWPPIFGQGTKVEIKRTVAAPSVFIFPPSDEQLKSGTASVVCLLNNFYPREAKVQWKVDNALQSGNSQESVTEQDSKDSTYSLSSTLTLSKADYEKHKVYACEVTHQGLSSPVTKSFNRGEC

SEQ ID NO: 498 - protein, 112 aa, Artificial Sequence
  Description of Artificial Sequence: Synthetic polypeptide
DIVMTQTPLSLPVTLGQPASLSCRSSQSLVFTDGNTYLNWFQQRPGQSPRRLIYKVSSRDPGVPDRFSGTGSGTDFTLEISRVEAEDIGVYYCMQGTHWPPIFGQGTKVEIK

SEQ ID NO: 499 - protein, 11 aa, Artificial Sequence
  Description of Artificial Sequence: Synthetic peptide
QSLVFTDGNTY

SEQ ID NO: 500 - protein, 3 aa, Artificial Sequence
  Description of Artificial Sequence: Synthetic peptide
KVS

SEQ ID NO: 501 - protein, 9 aa, Artificial Sequence
  Description of Artificial Sequence: Synthetic peptide
MQGTHWPPI

SEQ ID NO: 502 - protein, 715 aa, Artificial Sequence
  Description of Artificial Sequence: Synthetic polypeptide
QVQLVQSGAEVKKPGASVKVSCKASGYTFTGYYMHWVRQAPGQGLEWMGWINPDSGGTNYAQKFQGRVTMTRDTSISTAYMELNRLRSDDTAVYYCARDQPLGYCTNGVCSYFDYWGQGTLVTVSSASTKGPSVFPLAPSSKSTSGGTAALGCLVKDYFPEPVTVSWNSGALTSGVHTFPAVLQSSGLYSLSSVVTVPSSSLGTQTYICNVNHKPSNTKVDKKVEPKSCDKTHTCPPCPAPELLGGPSVFLFPPKPKDTLMISRTPEVTCVVVDVSHEDPEVKFNWYVDGVEVHNAKTKPREEQYNSTYRVVSVLTVLHQDWLNGKEYKCKVSNKALPAPIEKTISKAKGQPREPQVYTLPPSREEMTKNQVSLTCLVKGFYPSDIAVEWESNGQPENNYKTTPPVLDSDGSFFLYSKLTVDKSRWQQGNVFSCSVMHEALHNHYTQKSLSLSPGGGGGSGGGGSQVQLVQSGGGVVRPGGSLRLSCAASGFSFIDYGMSWVRQVPGKGLEWVAGMNWSGDKKGHAESVKGRFIISRDNAKNTLYLEMSSLRVEDTALYFCARGEYSNRFDPRGRGTLVTVSSGGGGSGGGGSGGGGSGGGGSDIVMTQTPLSLPVTLGQPASLSCRSSQSLVFTDGNTYLNWFQQRPGQSPRRLIYKVSSRDPGVPDRFSGTGSGTDFTLEISRVEAEDIGVYYCMQGTHWPPIFGQGTKVEIK

SEQ ID NO: 503 - protein, 710 aa, Artificial Sequence
  Description of Artificial Sequence: Synthetic polypeptide
QVQLVQSGGGVVRPGGSLRLSCAASGFSFIDYGMSWVRQVPGKGLEWVAGMNWSGDKKGHAESVKGRFIISRDNAKNTLYLEMSSLRVEDTALYFCARGEYSNRFDPRGRGTLVTVSSASTKGPSVFPLAPSSKSTSGGTAALGCLVKDYFPEPVTVSWNSGALTSGVHTFPAVLQSSGLYSLSSVVTVPSSSLGTQTYICNVNHKPSNTKVDKKVEPKSCDKTHTCPPCPAPELLGGPSVFLFPPKPKDTLMISRTPEVTCVVVDVSHEDPEVKFNWYVDGVEVHNAKTKPREEQYNSTYRVVSVLTVLHQDWLNGKEYKCKVSNKALPAPIEKTISKAKGQPREPQVYTLPPSREEMTKNQVSLTCLVKGFYPSDIAVEWESNGQPENNYKTTPPVLDSDGSFFLYSKLTVDKSRWQQGNVFSCSVMHEALHNHYTQKSLSLSPGGGGGSGGGGSQVQLVQSGAEVKKPGASVKVSCKASGYTFTGYYMHWVRQAPGQGLEWMGWINPDSGGTNYAQKFQGRVTMTRDTSISTAYMELNRLRSDDTAVYYCARDQPLGYCTNGVCSYFDYWGQGTLVTVSSGGGGSGGGGSGGGGSGGGGSDIQMTQSPSSVSASVGDRVTITCRASQGIYSWLAWYQQKPGKAPNLLIYTASTLQSGVPSRFSGSGSGTDFTLTISSLQPEDFATYYCQQANIFPLTFGGGTKVEIK

SEQ ID NO: 504 - protein, 482 aa, Artificial Sequence
  Description of Artificial Sequence: Synthetic polypeptide
DIVMTQTPLSLPVTLGQPASLSCRSSQSLVFTDGNTYLNWFQQRPGQSPRRLIYKVSSRDPGVPDRFSGTGSGTDFTLEISRVEAEDIGVYYCMQGTHWPPIFGQGTKVEIKRTVAAPSVFIFPPSDEQLKSGTASVVCLLNNFYPREAKVQWKVDNALQSGNSQESVTEQDSKDSTYSLSSTLTLSKADYEKHKVYACEVTHQGLSSPVTKSFNRGECGGGGSGGGGSQVQLVQSGAEVKKPGASVKVSCKASGYTFTGYYMHWVRQAPGQGLEWMGWINPDSGGTNYAQKFQGRVTMTRDTSISTAYMELNRLRSDDTAVYYCARDQPLGYCTNGVCSYFDYWGQGTLVTVSSGGGGSGGGGSGGGGSGGGGSDIQMTQSPSSVSASVGDRVTITCRASQGIYSWLAWYQQKPGKAPNLLIYTASTLQSGVPSRFSGSGSGTDFTLTISSLQPEDFATYYCQQANIFPLTFGGGTKVEIK

SEQ ID NO: 505 - protein, 703 aa, Artificial Sequence
  Description of Artificial Sequence: Synthetic polypeptide
QVQLVESGGGVVQPGRSLRLSCAASGFTFSNYGMYWVRQAPGKGLEWVAVIWYDGSNKYYADSVKGRFTISRDNSKNTLYLQMNSLRAEDTAVYYCARDLWGWYFDYWGQGTLVTVSSASTKGPSVFPLAPSSKSTSGGTAALGCLVKDYFPEPVTVSWNSGALTSGVHTFPAVLQSSGLYSLSSVVTVPSSSLGTQTYICNVNHKPSNTKVDKKVEPKSCDKTHTCPPCPAPELLGGPSVFLFPPKPKDTLMISRTPEVTCVVVDVSHEDPEVKFNWYVDGVEVHNAKTKPREEQYNSTYRVVSVLTVLHQDWLNGKEYKCKVSNKALPAPIEKTISKAKGQPREPQVYTLPPSREEMTKNQVSLTCLVKGFYPSDIAVEWESNGQPENNYKTTPPVLDSDGSFFLYSKLTVDKSRWQQGNVFSCSVMHEALHNHYTQKSLSLSPGGGGGSGGGGSEVQLVESGGGLVQPGGSLRLSCAASGFTFTDYTMDWVRQAPGKGLEWVADVNPNSGGSIYNQRFKGRFTLSVDRSKNTLYLQMNSLRAEDTAVYYCARNLGPSFYFDYWGQGTLVTVSSGGGGSGGGGSGGGGSGGGGSDIQMTQSPSSLSASVGDRVTITCKASQDVSIGVAWYQQKPGKAPKLLIYSASYRYTGVPSRFSGSGSGTDFTLTISSLQPEDFATYYCQQYYIYPYTFGQGTKVEIK

SEQ ID NO: 506 - protein, 703 aa, Artificial Sequence
  Description of Artificial Sequence: Synthetic polypeptide
EVQLVESGGGLVQPGGSLRLSCAASGFTFTDYTMDWVRQAPGKGLEWVADVNPNSGGSIYNQRFKGRFTLSVDRSKNTLYLQMNSLRAEDTAVYYCARNLGPSFYFDYWGQGTLVTVSSASTKGPSVFPLAPSSKSTSGGTAALGCLVKDYFPEPVTVSWNSGALTSGVHTFPAVLQSSGLYSLSSVVTVPSSSLGTQTYICNVNHKPSNTKVDKKVEPKSCDKTHTCPPCPAPELLGGPSVFLFPPKPKDTLMISRTPEVTCVVVDVSHEDPEVKFNWYVDGVEVHNAKTKPREEQYNSTYRVVSVLTVLHQDWLNGKEYKCKVSNKALPAPIEKTISKAKGQPREPQVYTLPPSREEMTKNQVSLTCLVKGFYPSDIAVEWESNGQPENNYKTTPPVLDSDGSFFLYSKLTVDKSRWQQGNVFSCSVMHEALHNHYTQKSLSLSPGGGGGSGGGGSQVQLVESGGGVVQPGRSLRLSCAASGFTFSNYGMYWVRQAPGKGLEWVAVIWYDGSNKYYADSVKGRFTISRDNSKNTLYLQMNSLRAEDTAVYYCARDLWGWYFDYWGQGTLVTVSSGGGGSGGGGSGGGGSGGGGSEIVLTQSPATLSLSPGERATLSCRASQSVSSYLAWYQQKPGQAPRLLIYDASNRATGIPARFSGSGSGTDFTLTISSLEPEDFAVYYCQQRRNWPLTFGGGTKVEIK

SEQ ID NO: 507 - protein, 703 aa, Artificial Sequence
  Description of Artificial Sequence: Synthetic polypeptide
QVQLVESGGGVVQPGRSLRLSCAASGFTFSNYGMYWVRQAPGKGLEWVAVIWYDGSNKYYADSVKGRFTISRDNSKNTLYLQMNSLRAEDTAVYYCARDLWGWYFDYWGQGTLVTVSSASTKGPSVFPLAPSSKSTSGGTAALGCLVKDYFPEPVTVSWNSGALTSGVHTFPAVLQSSGLYSLSSVVTVPSSSLGTQTYICNVNHKPSNTKVDKKVEPKSCDKTHTCPPCPAPELLGGPSVFLFPPKPKDTLMISRTPEVTCVVVDVSHEDPEVKFNWYVDGVEVHNAKTKPREEQYNSTYRVVSVLTVLHQDWLNGKEYKCKVSNKALPAPIEKTISKAKGQPREPQVYTLPPSREEMTKNQVSLTCLVKGFYPSDIAVEWESNGQPENNYKTTPPVLDSDGSFFLYSKLTVDKSRWQQGNVFSCSVMHEALHNHYTQKSLSLSPGGGGGSGGGGSQVQLKQSGPGLVQPSQSLSITCTVSGFSLTNYGVHWVRQSPGKGLEWLGVIWSGGNTDYNTPFTSRLSINKDNSKSQVFFKMNSLQSNDTAIYYCARALTYYDYEFAYWGQGTLVTVSAGGGGSGGGGSGGGGSGGGGSDILLTQSPVILSVSPGERVSFSCRASQSIGTNIHWYQQRTNGSPRLLIKYASESISGIPSRFSGSGSGTDFTLSINSVESEDIADYYCQQNNNWPTTFGAGTKLELK

SEQ ID NO: 508 - protein, 703 aa, Artificial Sequence
  Description of Artificial Sequence: Synthetic polypeptide
QVQLKQSGPGLVQPSQSLSITCTVSGFSLTNYGVHWVRQSPGKGLEWLGVIWSGGNTDYNTPFTSRLSINKDNSKSQVFFKMNSLQSNDTAIYYCARALTYYDYEFAYWGQGTLVTVSAASTKGPSVFPLAPSSKSTSGGTAALGCLVKDYFPEPVTVSWNSGALTSGVHTFPAVLQSSGLYSLSSVVTVPSSSLGTQTYICNVNHKPSNTKVDKKVEPKSCDKTHTCPPCPAPELLGGPSVFLFPPKPKDTLMISRTPEVTCVVVDVSHEDPEVKFNWYVDGVEVHNAKTKPREEQYNSTYRVVSVLTVLHQDWLNGKEYKCKVSNKALPAPIEKTISKAKGQPREPQVYTLPPSREEMTKNQVSLTCLVKGFYPSDIAVEWESNGQPENNYKTTPPVLDSDGSFFLYSKLTVDKSRWQQGNVFSCSVMHEALHNHYTQKSLSLSPGGGGGSGGGGSQVQLVESGGGVVQPGRSLRLSCAASGFTFSNYGMYWVRQAPGKGLEWVAVIWYDGSNKYYADSVKGRFTISRDNSKNTLYLQMNSLRAEDTAVYYCARDLWGWYFDYWGQGTLVTVSSGGGGSGGGGSGGGGSGGGGSEIVLTQSPATLSLSPGERATLSCRASQSVSSYLAWYQQKPGQAPRLLIYDASNRATGIPARFSGSGSGTDFTLTISSLEPEDFAVYYCQQRRNWPLTFGGGTKVEIK

SEQ ID NO: 509 - protein, 703 aa, Artificial Sequence
  Description of Artificial Sequence: Synthetic polypeptide
QVQLVESGGGVVQPGRSLRLSCAASGFTFSNYGMYWVRQAPGKGLEWVAVIWYDGSNKYYADSVKGRFTISRDNSKNTLYLQMNSLRAEDTAVYYCARDLWGWYFDYWGQGTLVTVSSASTKGPSVFPLAPSSKSTSGGTAALGCLVKDYFPEPVTVSWNSGALTSGVHTFPAVLQSSGLYSLSSVVTVPSSSLGTQTYICNVNHKPSNTKVDKKVEPKSCDKTHTCPPCPAPELLGGPSVFLFPPKPKDTLMISRTPEVTCVVVDVSHEDPEVKFNWYVDGVEVHNAKTKPREEQYNSTYRVVSVLTVLHQDWLNGKEYKCKVSNKALPAPIEKTISKAKGQPREPQVYTLPPSREEMTKNQVSLTCLVKGFYPSDIAVEWESNGQPENNYKTTPPVLDSDGSFFLYSKLTVDKSRWQQGNVFSCSVMHEALHNHYTQKSLSLSPGGGGGSGGGGSQVQLQESGPGLVKPSETLSLTCTVSGGSVSSGDYYWTWIRQSPGKGLEWIGHIYYSGNTNYNPSLKSRLTISIDTSKTQFSLKLSSVTAADTAIYYCVRDRVTGAFDIWGQGTMVTVSSGGGGSGGGGSGGGGSGGGGSDIQMTQSPSSLSASVGDRVTITCQASQDISNYLNWYQQKPGKAPKLLIYDASNLETGVPSRFSGSGSGTDFTFTISSLQPEDIATYFCQHFDHLPLAFGGGTKVEIK

SEQ ID NO: 510 - protein, 703 aa, Artificial Sequence
  Description of Artificial Sequence: Synthetic polypeptide
QVQLQESGPGLVKPSETLSLTCTVSGGSVSSGDYYWTWIRQSPGKGLEWIGHIYYSGNTNYNPSLKSRLTISIDTSKTQFSLKLSSVTAADTAIYYCVRDRVTGAFDIWGQGTMVTVSSASTKGPSVFPLAPSSKSTSGGTAALGCLVKDYFPEPVTVSWNSGALTSGVHTFPAVLQSSGLYSLSSVVTVPSSSLGTQTYICNVNHKPSNTKVDKKVEPKSCDKTHTCPPCPAPELLGGPSVFLFPPKPKDTLMISRTPEVTCVVVDVSHEDPEVKFNWYVDGVEVHNAKTKPREEQYNSTYRVVSVLTVLHQDWLNGKEYKCKVSNKALPAPIEKTISKAKGQPREPQVYTLPPSREEMTKNQVSLTCLVKGFYPSDIAVEWESNGQPENNYKTTPPVLDSDGSFFLYSKLTVDKSRWQQGNVFSCSVMHEALHNHYTQKSLSLSPGGGGGSGGGGSQVQLVESGGGVVQPGRSLRLSCAASGFTFSNYGMYWVRQAPGKGLEWVAVIWYDGSNKYYADSVKGRFTISRDNSKNTLYLQMNSLRAEDTAVYYCARDLWGWYFDYWGQGTLVTVSSGGGGSGGGGSGGGGSGGGGSEIVLTQSPATLSLSPGERATLSCRASQSVSSYLAWYQQKPGQAPRLLIYDASNRATGIPARFSGSGSGTDFTLTISSLEPEDFAVYYCQQRRNWPLTFGGGTKVEIK

SEQ ID NO: 511 - protein, 712 aa, Artificial Sequence
  Description of Artificial Sequence: Synthetic polypeptide
QVQLVESGGGVVQPGRSLRLSCAASGFTFSNYGMYWVRQAPGKGLEWVAVIWYDGSNKYYADSVKGRFTISRDNSKNTLYLQMNSLRAEDTAVYYCARDLWGWYFDYWGQGTLVTVSSASTKGPSVFPLAPSSKSTSGGTAALGCLVKDYFPEPVTVSWNSGALTSGVHTFPAVLQSSGLYSLSSVVTVPSSSLGTQTYICNVNHKPSNTKVDKKVEPKSCDKTHTCPPCPAPELLGGPSVFLFPPKPKDTLMISRTPEVTCVVVDVSHEDPEVKFNWYVDGVEVHNAKTKPREEQYNSTYRVVSVLTVLHQDWLNGKEYKCKVSNKALPAPIEKTISKAKGQPREPQVYTLPPSREEMTKNQVSLTCLVKGFYPSDIAVEWESNGQPENNYKTTPPVLDSDGSFFLYSKLTVDKSRWQQGNVFSCSVMHEALHNHYTQKSLSLSPGGGGGSGGGGSQVQLQQSGAEVKKPGSSVKVSCKASGYTFTNYYIYWVRQAPGQGLEWIGGINPTSGGSNFNEKFKTRVTITVDESTNTAYMELSSLRSEDTAFYFCARQGLWFDSDGRGFDFWGQGSTVTVSSGGGGSGGGGSGGGGSGGGGSDIQMTQSPSSLSASVGDRVTITCRSSQNIVHSNGNTYLDWYQQTPGKAPKLLIYKVSNRFSGVPSRFSGSGSGTDFTFTISSLQPEDIATYYCFQYSHVPWTFGQGTKLEIK

SEQ ID NO: 512 - protein, 707 aa, Artificial Sequence
  Description of Artificial Sequence: Synthetic polypeptide
QVQLQQSGAEVKKPGSSVKVSCKASGYTFTNYYIYWVRQAPGQGLEWIGGINPTSGGSNFNEKFKTRVTITVDESTNTAYMELSSLRSEDTAFYFCARQGLWFDSDGRGFDFWGQGSTVTVSSASTKGPSVFPLAPSSKSTSGGTAALGCLVKDYFPEPVTVSWNSGALTSGVHTFPAVLQSSGLYSLSSVVTVPSSSLGTQTYICNVNHKPSNTKVDKKVEPKSCDKTHTCPPCPAPELLGGPSVFLFPPKPKDTLMISRTPEVTCVVVDVSHEDPEVKFNWYVDGVEVHNAKTKPREEQYNSTYRVVSVLTVLHQDWLNGKEYKCKVSNKALPAPIEKTISKAKGQPREPQVYTLPPSREEMTKNQVSLTCLVKGFYPSDIAVEWESNGQPENNYKTTPPVLDSDGSFFLYSKLTVDKSRWQQGNVFSCSVMHEALHNHYTQKSLSLSPGGGGGSGGGGSQVQLVESGGGVVQPGRSLRLSCAASGFTFSNYGMYWVRQAPGKGLEWVAVIWYDGSNKYYADSVKGRFTISRDNSKNTLYLQMNSLRAEDTAVYYCARDLWGWYFDYWGQGTLVTVSSGGGGSGGGGSGGGGSGGGGSEIVLTQSPATLSLSPGERATLSCRASQSVSSYLAWYQQKPGQAPRLLIYDASNRATGIPARFSGSGSGTDFTLTISSLEPEDFAVYYCQQRRNWPLTFGGGTKVEIK

SEQ ID NO: 513 - protein, 709 aa, Artificial Sequence
  Description of Artificial Sequence: Synthetic polypeptide
QVQLVESGGGVVQPGRSLRLSCAASGFTFSNYGMYWVRQAPGKGLEWVAVIWYDGSNKYYADSVKGRFTISRDNSKNTLYLQMNSLRAEDTAVYYCARDLWGWYFDYWGQGTLVTVSSASTKGPSVFPLAPSSKSTSGGTAALGCLVKDYFPEPVTVSWNSGALTSGVHTFPAVLQSSGLYSLSSVVTVPSSSLGTQTYICNVNHKPSNTKVDKKVEPKSCDKTHTCPPCPAPELLGGPSVFLFPPKPKDTLMISRTPEVTCVVVDVSHEDPEVKFNWYVDGVEVHNAKTKPREEQYNSTYRVVSVLTVLHQDWLNGKEYKCKVSNKALPAPIEKTISKAKGQPREPQVYTLPPSREEMTKNQVSLTCLVKGFYPSDIAVEWESNGQPENNYKTTPPVLDSDGSFFLYSKLTVDKSRWQQGNVFSCSVMHEALHNHYTQKSLSLSPGGGGGSGGGGSQVQLVESGGGVVQPGRSLRLSCAASGFTFSTYGMHWVRQAPGKGLEWVAVIWDDGSYKYYGDSVKGRFTISRDNSKNTLYLQMNSLRAEDTAVYYCARDGITMVRGVMKDYFDYWGQGTLVTVSSGGGGSGGGGSGGGGSGGGGSAIQLTQSPSSLSASVGDRVTITCRASQDISSALVWYQQKPGKAPKLLIYDASSLESGVPSRFSGSESGTDFTLTISSLQPEDFATYYCQQFNSYPLTFGGGTKVEIK

SEQ ID NO: 514 - protein, 709 aa, Artificial Sequence
  Description of Artificial Sequence: Synthetic polypeptide
QVQLVESGGGVVQPGRSLRLSCAASGFTFSTYGMHWVRQAPGKGLEWVAVIWDDGSYKYYGDSVKGRFTISRDNSKNTLYLQMNSLRAEDTAVYYCARDGITMVRGVMKDYFDYWGQGTLVTVSSASTKGPSVFPLAPSSKSTSGGTAALGCLVKDYFPEPVTVSWNSGALTSGVHTFPAVLQSSGLYSLSSVVTVPSSSLGTQTYICNVNHKPSNTKVDKKVEPKSCDKTHTCPPCPAPELLGGPSVFLFPPKPKDTLMISRTPEVTCVVVDVSHEDPEVKFNWYVDGVEVHNAKTKPREEQYNSTYRVVSVLTVLHQDWLNGKEYKCKVSNKALPAPIEKTISKAKGQPREPQVYTLPPSREEMTKNQVSLTCLVKGFYPSDIAVEWESNGQPENNYKTTPPVLDSDGSFFLYSKLTVDKSRWQQGNVFSCSVMHEALHNHYTQKSLSLSPGGGGGSGGGGSQVQLVESGGGVVQPGRSLRLSCAASGFTFSNYGMYWVRQAPGKGLEWVAVIWYDGSNKYYADSVKGRFTISRDNSKNTLYLQMNSLRAEDTAVYYCARDLWGWYFDYWGQGTLVTVSSGGGGSGGGGSGGGGSGGGGSEIVLTQSPATLSLSPGERATLSCRASQSVSSYLAWYQQKPGQAPRLLIYDASNRATGIPARFSGSGSGTDFTLTISSLEPEDFAVYYCQQRRNWPLTFGGGTKVEIK

SEQ ID NO: 515 - protein, 709 aa, Artificial Sequence
  Description of Artificial Sequence: Synthetic polypeptide
QVQLVESGGGVVQPGRSLRLSCAASGFTFSNYGMYWVRQAPGKGLEWVAVIWYDGSNKYYADSVKGRFTISRDNSKNTLYLQMNSLRAEDTAVYYCARDLWGWYFDYWGQGTLVTVSSASTKGPSVFPLAPSSKSTSGGTAALGCLVKDYFPEPVTVSWNSGALTSGVHTFPAVLQSSGLYSLSSVVTVPSSSLGTQTYICNVNHKPSNTKVDKKVEPKSCDKTHTCPPCPAPELLGGPSVFLFPPKPKDTLMISRTPEVTCVVVDVSHEDPEVKFNWYVDGVEVHNAKTKPREEQYNSTYRVVSVLTVLHQDWLNGKEYKCKVSNKALPAPIEKTISKAKGQPREPQVYTLPPSREEMTKNQVSLTCLVKGFYPSDIAVEWESNGQPENNYKTTPPVLDSDGSFFLYSKLTVDKSRWQQGNVFSCSVMHEALHNHYTQKSLSLSPGGGGGSGGGGSEVQLVESGGGLVQPGGSLRLSCAASGYTFTSYWLHWVRQAPGKGLEWVGMIDPSNSDTRFNPNFKDRFTISADTSKNTAYLQMNSLRAEDTAVYYCATYRSYVTPLDYWGQGTLVTVSSGGGGSGGGGSGGGGSGGGGSDIQMTQSPSSLSASVGDRVTITCKSSQSLLYTSSQKNYLAWYQQKPGKAPKLLIYWASTRESGVPSRFSGSGSGTDFTLTISSLQPEDFATYYCQQYYAYPWTFGQGTKVEIK

SEQ ID NO: 516 - protein, 703 aa, Artificial Sequence
  Description of Artificial Sequence: Synthetic polypeptide
EVQLVESGGGLVQPGGSLRLSCAASGYTFTSYWLHWVRQAPGKGLEWVGMIDPSNSDTRFNPNFKDRFTISADTSKNTAYLQMNSLRAEDTAVYYCATYRSYVTPLDYWGQGTLVTVSSASTKGPSVFPLAPSSKSTSGGTAALGCLVKDYFPEPVTVSWNSGALTSGVHTFPAVLQSSGLYSLSSVVTVPSSSLGTQTYICNVNHKPSNTKVDKKVEPKSCDKTHTCPPCPAPELLGGPSVFLFPPKPKDTLMISRTPEVTCVVVDVSHEDPEVKFNWYVDGVEVHNAKTKPREEQYNSTYRVVSVLTVLHQDWLNGKEYKCKVSNKALPAPIEKTISKAKGQPREPQVYTLPPSREEMTKNQVSLTCLVKGFYPSDIAVEWESNGQPENNYKTTPPVLDSDGSFFLYSKLTVDKSRWQQGNVFSCSVMHEALHNHYTQKSLSLSPGGGGGSGGGGSQVQLVESGGGVVQPGRSLRLSCAASGFTFSNYGMYWVRQAPGKGLEWVAVIWYDGSNKYYADSVKGRFTISRDNSKNTLYLQMNSLRAEDTAVYYCARDLWGWYFDYWGQGTLVTVSSGGGGSGGGGSGGGGSGGGGSEIVLTQSPATLSLSPGERATLSCRASQSVSSYLAWYQQKPGQAPRLLIYDASNRATGIPARFSGSGSGTDFTLTISSLEPEDFAVYYCQQRRNWPLTFGGGTKVEIK

SEQ ID NO: 517 - protein, 707 aa, Artificial Sequence
  Description of Artificial Sequence: Synthetic polypeptide
QVQLVESGGGVVQPGRSLRLSCAASGFTFSNYGMYWVRQAPGKGLEWVAVIWYDGSNKYYADSVKGRFTISRDNSKNTLYLQMNSLRAEDTAVYYCARDLWGWYFDYWGQGTLVTVSSASTKGPSVFPLAPSSKSTSGGTAALGCLVKDYFPEPVTVSWNSGALTSGVHTFPAVLQSSGLYSLSSVVTVPSSSLGTQTYICNVNHKPSNTKVDKKVEPKSCDKTHTCPPCPAPELLGGPSVFLFPPKPKDTLMISRTPEVTCVVVDVSHEDPEVKFNWYVDGVEVHNAKTKPREEQYNSTYRVVSVLTVLHQDWLNGKEYKCKVSNKALPAPIEKTISKAKGQPREPQVYTLPPSREEMTKNQVSLTCLVKGFYPSDIAVEWESNGQPENNYKTTPPVLDSDGSFFLYSKLTVDKSRWQQGNVFSCSVMHEALHNHYTQKSLSLSPGGGGGSGGGGSQVQLQQWGAGLLKPSETLSLTCAVYGGSFSGYYWSWIRQPPGKGLEWIGEINHSGSTNYNPSLKSRVTISVETSKNQFSLKLSSVTAADTAVYYCARDKWTWYFDLWGRGTLVTVSSGGGGSGGGGSGGGGSGGGGSDIEMTQSPDSLAVSLGERATINCRSSQSVLYSSSNRNYLAWYQQNPGQPPKLLIYWASTRESGVPDRFSGSGSGTDFTLTISSLQAEDVAVYYCQQYYSTPRTFGQGTKVEIK

SEQ ID NO: 518 - protein, 701 aa, Artificial Sequence
  Description of Artificial Sequence: Synthetic polypeptide
QVQLQQWGAGLLKPSETLSLTCAVYGGSFSGYYWSWIRQPPGKGLEWIGEINHSGSTNYNPSLKSRVTISVETSKNQFSLKLSSVTAADTAVYYCARDKWTWYFDLWGRGTLVTVSSASTKGPSVFPLAPSSKSTSGGTAALGCLVKDYFPEPVTVSWNSGALTSGVHTFPAVLQSSGLYSLSSVVTVPSSSLGTQTYICNVNHKPSNTKVDKKVEPKSCDKTHTCPPCPAPELLGGPSVFLFPPKPKDTLMISRTPEVTCVVVDVSHEDPEVKFNWYVDGVEVHNAKTKPREEQYNSTYRVVSVLTVLHQDWLNGKEYKCKVSNKALPAPIEKTISKAKGQPREPQVYTLPPSREEMTKNQVSLTCLVKGFYPSDIAVEWESNGQPENNYKTTPPVLDSDGSFFLYSKLTVDKSRWQQGNVFSCSVMHEALHNHYTQKSLSLSPGGGGGSGGGGSQVQLVESGGGVVQPGRSLRLSCAASGFTFSNYGMYWVRQAPGKGLEWVAVIWYDGSNKYYADSVKGRFTISRDNSKNTLYLQMNSLRAEDTAVYYCARDLWGWYFDYWGQGTLVTVSSGGGGSGGGGSGGGGSGGGGSEIVLTQSPATLSLSPGERATLSCRASQSVSSYLAWYQQKPGQAPRLLIYDASNRATGIPARFSGSGSGTDFTLTISSLEPEDFAVYYCQQRRNWPLTFGGGTKVEIK

SEQ ID NO: 519 - protein, 704 aa, Artificial Sequence
  Description of Artificial Sequence: Synthetic polypeptide
QVQLVESGGGVVQPGRSLRLSCAASGFTFSNYGMYWVRQAPGKGLEWVAVIWYDGSNKYYADSVKGRFTISRDNSKNTLYLQMNSLRAEDTAVYYCARDLWGWYFDYWGQGTLVTVSSASTKGPSVFPLAPSSKSTSGGTAALGCLVKDYFPEPVTVSWNSGALTSGVHTFPAVLQSSGLYSLSSVVTVPSSSLGTQTYICNVNHKPSNTKVDKKVEPKSCDKTHTCPPCPAPELLGGPSVFLFPPKPKDTLMISRTPEVTCVVVDVSHEDPEVKFNWYVDGVEVHNAKTKPREEQYNSTYRVVSVLTVLHQDWLNGKEYKCKVSNKALPAPIEKTISKAKGQPREPQVYTLPPSREEMTKNQVSLTCLVKGFYPSDIAVEWESNGQPENNYKTTPPVLDSDGSFFLYSKLTVDKSRWQQGNVFSCSVMHEALHNHYTQKSLSLSPGGGGGSGGGGSQVQLQQSGAEVKKPGASVKVSCEASGYTFPSYVLHWVKQAPGQGLEWIGYINPYNDGTQYNEKFKGKATLTRDTSINTAYMELSRLRSDDTAVYYCARGFGGSYGFAYWGQGTLVTVSSGGGGSGGGGSGGGGSGGGGSDIQLTQSPSSLSASVGDRVTMTCSASSSVSSSYLYWYQQKPGKAPKLWIYSTSNLASGVPARFSGSGSGTDFTLTISSLQPEDSASYFCHQWNRYPYTFGGGTRLEIK

SEQ ID NO: 520 - protein, 703 aa, Artificial Sequence
  Description of Artificial Sequence: Synthetic polypeptide
QVQLQQSGAEVKKPGASVKVSCEASGYTFPSYVLHWVKQAPGQGLEWIGYINPYNDGTQYNEKFKGKATLTRDTSINTAYMELSRLRSDDTAVYYCARGFGGSYGFAYWGQGTLVTVSSASTKGPSVFPLAPSSKSTSGGTAALGCLVKDYFPEPVTVSWNSGALTSGVHTFPAVLQSSGLYSLSSVVTVPSSSLGTQTYICNVNHKPSNTKVDKKVEPKSCDKTHTCPPCPAPELLGGPSVFLFPPKPKDTLMISRTPEVTCVVVDVSHEDPEVKFNWYVDGVEVHNAKTKPREEQYNSTYRVVSVLTVLHQDWLNGKEYKCKVSNKALPAPIEKTISKAKGQPREPQVYTLPPSREEMTKNQVSLTCLVKGFYPSDIAVEWESNGQPENNYKTTPPVLDSDGSFFLYSKLTVDKSRWQQGNVFSCSVMHEALHNHYTQKSLSLSPGGGGGSGGGGSQVQLVESGGGVVQPGRSLRLSCAASGFTFSNYGMYWVRQAPGKGLEWVAVIWYDGSNKYYADSVKGRFTISRDNSKNTLYLQMNSLRAEDTAVYYCARDLWGWYFDYWGQGTLVTVSSGGGGSGGGGSGGGGSGGGGSEIVLTQSPATLSLSPGERATLSCRASQSVSSYLAWYQQKPGQAPRLLIYDASNRATGIPARFSGSGSGTDFTLTISSLEPEDFAVYYCQQRRNWPLTFGGGTKVEIK

SEQ ID NO: 521 - protein, 700 aa, Artificial Sequence
  Description of Artificial Sequence: Synthetic polypeptide
QVQLVESGGGVVQPGRSLRLSCAASGFTFSNYGMYWVRQAPGKGLEWVAVIWYDGSNKYYADSVKGRFTISRDNSKNTLYLQMNSLRAEDTAVYYCARDLWGWYFDYWGQGTLVTVSSASTKGPSVFPLAPSSKSTSGGTAALGCLVKDYFPEPVTVSWNSGALTSGVHTFPAVLQSSGLYSLSSVVTVPSSSLGTQTYICNVNHKPSNTKVDKKVEPKSCDKTHTCPPCPAPELLGGPSVFLFPPKPKDTLMISRTPEVTCVVVDVSHEDPEVKFNWYVDGVEVHNAKTKPREEQYNSTYRVVSVLTVLHQDWLNGKEYKCKVSNKALPAPIEKTISKAKGQPREPQVYTLPPSREEMTKNQVSLTCLVKGFYPSDIAVEWESNGQPENNYKTTPPVLDSDGSFFLYSKLTVDKSRWQQGNVFSCSVMHEALHNHYTQKSLSLSPGGGGGSGGGGSEVQLVESGGGLVQPGGSLRLSCAASGYSITNDYAWNWVRQAPGKGLEWVGYISYSGYTTYNPSLKSRFTISRDTSKNTLYLQMNSLRAEDTAVYYCARWTSGLDYWGQGTLVTVSSGGGGSGGGGSGGGGSGGGGSDIQMTQSPSSLSASVGDRVTITCKASDLIHNWLAWYQQKPGKAPKLLIYGATSLETGVPSRFSGSGSGTDFTLTISSLQPEDFATYYCQQYWTTPFTFGQGTKVEIK

SEQ ID NO: 522 - protein, 700 aa, Artificial Sequence
  Description of Artificial Sequence: Synthetic polypeptide
EVQLVESGGGLVQPGGSLRLSCAASGYSITNDYAWNWVRQAPGKGLEWVGYISYSGYTTYNPSLKSRFTISRDTSKNTLYLQMNSLRAEDTAVYYCARWTSGLDYWGQGTLVTVSSASTKGPSVFPLAPSSKSTSGGTAALGCLVKDYFPEPVTVSWNSGALTSGVHTFPAVLQSSGLYSLSSVVTVPSSSLGTQTYICNVNHKPSNTKVDKKVEPKSCDKTHTCPPCPAPELLGGPSVFLFPPKPKDTLMISRTPEVTCVVVDVSHEDPEVKFNWYVDGVEVHNAKTKPREEQYNSTYRVVSVLTVLHQDWLNGKEYKCKVSNKALPAPIEKTISKAKGQPREPQVYTLPPSREEMTKNQVSLTCLVKGFYPSDIAVEWESNGQPENNYKTTPPVLDSDGSFFLYSKLTVDKSRWQQGNVFSCSVMHEALHNHYTQKSLSLSPGGGGGSGGGGSQVQLVESGGGVVQPGRSLRLSCAASGFTFSNYGMYWVRQAPGKGLEWVAVIWYDGSNKYYADSVKGRFTISRDNSKNTLYLQMNSLRAEDTAVYYCARDLWGWYFDYWGQGTLVTVSSGGGGSGGGGSGGGGSGGGGSEIVLTQSPATLSLSPGERATLSCRASQSVSSYLAWYQQKPGQAPRLLIYDASNRATGIPARFSGSGSGTDFTLTISSLEPEDFAVYYCQQRRNWPLTFGGGTKVEIK

SEQ ID NO: 523 - protein, 700 aa, Artificial Sequence
  Description of Artificial Sequence: Synthetic polypeptide
QVQLVESGGGVVQPGRSLRLSCAASGFTFSNYGMYWVRQAPGKGLEWVAVIWYDGSNKYYADSVKGRFTISRDNSKNTLYLQMNSLRAEDTAVYYCARDLWGWYFDYWGQGTLVTVSSASTKGPSVFPLAPSSKSTSGGTAALGCLVKDYFPEPVTVSWNSGALTSGVHTFPAVLQSSGLYSLSSVVTVPSSSLGTQTYICNVNHKPSNTKVDKKVEPKSCDKTHTCPPCPAPELLGGPSVFLFPPKPKDTLMISRTPEVTCVVVDVSHEDPEVKFNWYVDGVEVHNAKTKPREEQYNSTYRVVSVLTVLHQDWLNGKEYKCKVSNKALPAPIEKTISKAKGQPREPQVYTLPPSREEMTKNQVSLTCLVKGFYPSDIAVEWESNGQPENNYKTTPPVLDSDGSFFLYSKLTVDKSRWQQGNVFSCSVMHEALHNHYTQKSLSLSPGGGGGSGGGGSQVQLQQSGAELVRPGTSVKVSCKASGYAFTNYLIEWVKQRPGQGLEWIGVINPGSGGTNYNEKFKGKATLTADKSSSTAYMQLSSLTSDDSAVYFCARDGPWFAYWGQGTLVTVSAGGGGSGGGGSGGGGSGGGGSNIVMTQSPKSMSMSVGERVTLTCKASENVVTYVSWYQQKPEQSPKLLIYGASNRYTGVPDRFTGSGSATDFTLTISSVQAEDLADYHCGQGYSYPYTFGGGTKLEIK

SEQ ID NO: 524 - protein, 700 aa, Artificial Sequence
  Description of Artificial Sequence: Synthetic polypeptide
QVQLQQSGAELVRPGTSVKVSCKASGYAFTNYLIEWVKQRPGQGLEWIGVINPGSGGTNYNEKFKGKATLTADKSSSTAYMQLSSLTSDDSAVYFCARDGPWFAYWGQGTLVTVSAASTKGPSVFPLAPSSKSTSGGTAALGCLVKDYFPEPVTVSWNSGALTSGVHTFPAVLQSSGLYSLSSVVTVPSSSLGTQTYICNVNHKPSNTKVDKKVEPKSCDKTHTCPPCPAPELLGGPSVFLFPPKPKDTLMISRTPEVTCVVVDVSHEDPEVKFNWYVDGVEVHNAKTKPREEQYNSTYRVVSVLTVLHQDWLNGKEYKCKVSNKALPAPIEKTISKAKGQPREPQVYTLPPSREEMTKNQVSLTCLVKGFYPSDIAVEWESNGQPENNYKTTPPVLDSDGSFFLYSKLTVDKSRWQQGNVFSCSVMHEALHNHYTQKSLSLSPGGGGGSGGGGSQVQLVESGGGVVQPGRSLRLSCAASGFTFSNYGMYWVRQAPGKGLEWVAVIWYDGSNKYYADSVKGRFTISRDNSKNTLYLQMNSLRAEDTAVYYCARDLWGWYFDYWGQGTLVTVSSGGGGSGGGGSGGGGSGGGGSEIVLTQSPATLSLSPGERATLSCRASQSVSSYLAWYQQKPGQAPRLLIYDASNRATGIPARFSGSGSGTDFTLTISSLEPEDFAVYYCQQRRNWPLTFGGGTKVEIK

SEQ ID NO: 525 - protein, 711 aa, Artificial Sequence
  Description of Artificial Sequence: Synthetic polypeptide
QVQLVESGGGVVQPGRSLRLSCAASGFTFSNYGMYWVRQAPGKGLEWVAVIWYDGSNKYYADSVKGRFTISRDNSKNTLYLQMNSLRAEDTAVYYCARDLWGWYFDYWGQGTLVTVSSASTKGPSVFPLAPSSKSTSGGTAALGCLVKDYFPEPVTVSWNSGALTSGVHTFPAVLQSSGLYSLSSVVTVPSSSLGTQTYICNVNHKPSNTKVDKKVEPKSCDKTHTCPPCPAPELLGGPSVFLFPPKPKDTLMISRTPEVTCVVVDVSHEDPEVKFNWYVDGVEVHNAKTKPREEQYNSTYRVVSVLTVLHQDWLNGKEYKCKVSNKALPAPIEKTISKAKGQPREPQVYTLPPSREEMTKNQVSLTCLVKGFYPSDIAVEWESNGQPENNYKTTPPVLDSDGSFFLYSKLTVDKSRWQQGNVFSCSVMHEALHNHYTQKSLSLSPGGGGGSGGGGSEVQLLESGGGVVQPGRSLRLSCAASGFTFSSYGMHWVRQAPGKGLEWVAVISYDGSNKYYADSVKGRFTISRDNSKNTLYLQMNSLRAEDTAVYYCAKDMGWGSGWRPYYYYGMDVWGQGTTVTVSSGGGGSGGGGSGGGGSGGGGSELQMTQSPSSLSASVGDRVTITCRTSQSISSYLNWYQQKPGQPPKLLIYWASTRESGVPDRFSGSGSGTDFTLTISSLQPEDSATYYCQQSYDIPYTFGQGTKLEIK

SEQ ID NO: 526 - protein, 711 aa, Artificial Sequence
  Description of Artificial Sequence: Synthetic polypeptide
EVQLLESGGGVVQPGRSLRLSCAASGFTFSSYGMHWVRQAPGKGLEWVAVISYDGSNKYYADSVKGRFTISRDNSKNTLYLQMNSLRAEDTAVYYCAKDMGWGSGWRPYYYYGMDVWGQGTTVTVSSASTKGPSVFPLAPSSKSTSGGTAALGCLVKDYFPEPVTVSWNSGALTSGVHTFPAVLQSSGLYSLSSVVTVPSSSLGTQTYICNVNHKPSNTKVDKKVEPKSCDKTHTCPPCPAPELLGGPSVFLFPPKPKDTLMISRTPEVTCVVVDVSHEDPEVKFNWYVDGVEVHNAKTKPREEQYNSTYRVVSVLTVLHQDWLNGKEYKCKVSNKALPAPIEKTISKAKGQPREPQVYTLPPSREEMTKNQVSLTCLVKGFYPSDIAVEWESNGQPENNYKTTPPVLDSDGSFFLYSKLTVDKSRWQQGNVFSCSVMHEALHNHYTQKSLSLSPGGGGGSGGGGSQVQLVESGGGVVQPGRSLRLSCAASGFTFSNYGMYWVRQAPGKGLEWVAVIWYDGSNKYYADSVKGRFTISRDNSKNTLYLQMNSLRAEDTAVYYCARDLWGWYFDYWGQGTLVTVSSGGGGSGGGGSGGGGSGGGGSEIVLTQSPATLSLSPGERATLSCRASQSVSSYLAWYQQKPGQAPRLLIYDASNRATGIPARFSGSGSGTDFTLTISSLEPEDFAVYYCQQRRNWPLTFGGGTKVEIK

SEQ ID NO: 527 - protein, 708 aa, Artificial Sequence
  Description of Artificial Sequence: Synthetic polypeptide
QVQLVESGGGVVQPGRSLRLSCAASGFTFSNYGMYWVRQAPGKGLEWVAVIWYDGSNKYYADSVKGRFTISRDNSKNTLYLQMNSLRAEDTAVYYCARDLWGWYFDYWGQGTLVTVSSASTKGPSVFPLAPSSKSTSGGTAALGCLVKDYFPEPVTVSWNSGALTSGVHTFPAVLQSSGLYSLSSVVTVPSSSLGTQTYICNVNHKPSNTKVDKKVEPKSCDKTHTCPPCPAPELLGGPSVFLFPPKPKDTLMISRTPEVTCVVVDVSHEDPEVKFNWYVDGVEVHNAKTKPREEQYNSTYRVVSVLTVLHQDWLNGKEYKCKVSNKALPAPIEKTISKAKGQPREPQVYTLPPSREEMTKNQVSLTCLVKGFYPSDIAVEWESNGQPENNYKTTPPVLDSDGSFFLYSKLTVDKSRWQQGNVFSCSVMHEALHNHYTQKSLSLSPGGGGGSGGGGSQVELVQSGAEVKKPGESLKISCKGSGYSFTSYWIGWVRQAPGKGLEWMGIIDPGDSRTRYSPSFQGQVTISADKSISTAYLQWSSLKASDTAMYYCARGQLYGGTYMDGWGQGTLVTVSSGGGGSGGGGSGGGGSGGGGSDIALTQPASVSGSPGQSITISCTGTSSDIGGYNSVSWYQQHPGKAPKLMIYGVNNRPSGVSNRFSGSKSGNTASLTISGLQAEDEADYYCSSYDIESATPVFGGGTKLTVL

SEQ ID NO: 528 - protein, 704 aa, Artificial Sequence
  Description of Artificial Sequence: Synthetic polypeptide
QVELVQSGAEVKKPGESLKISCKGSGYSFTSYWIGWVRQAPGKGLEWMGIIDPGDSRTRYSPSFQGQVTISADKSISTAYLQWSSLKASDTAMYYCARGQLYGGTYMDGWGQGTLVTVSSASTKGPSVFPLAPSSKSTSGGTAALGCLVKDYFPEPVTVSWNSGALTSGVHTFPAVLQSSGLYSLSSVVTVPSSSLGTQTYICNVNHKPSNTKVDKKVEPKSCDKTHTCPPCPAPELLGGPSVFLFPPKPKDTLMISRTPEVTCVVVDVSHEDPEVKFNWYVDGVEVHNAKTKPREEQYNSTYRVVSVLTVLHQDWLNGKEYKCKVSNKALPAPIEKTISKAKGQPREPQVYTLPPSREEMTKNQVSLTCLVKGFYPSDIAVEWESNGQPENNYKTTPPVLDSDGSFFLYSKLTVDKSRWQQGNVFSCSVMHEALHNHYTQKSLSLSPGGGGGSGGGGSQVQLVESGGGVVQPGRSLRLSCAASGFTFSNYGMYWVRQAPGKGLEWVAVIWYDGSNKYYADSVKGRFTISRDNSKNTLYLQMNSLRAEDTAVYYCARDLWGWYFDYWGQGTLVTVSSGGGGSGGGGSGGGGSGGGGSEIVLTQSPATLSLSPGERATLSCRASQSVSSYLAWYQQKPGQAPRLLIYDASNRATGIPARFSGSGSGTDFTLTISSLEPEDFAVYYCQQRRNWPLTFGGGTKVEIK

SEQ ID NO: 529 - protein, 700 aa, Artificial Sequence
  Description of Artificial Sequence: Synthetic polypeptide
QVQLVESGGGVVQPGRSLRLSCAASGFTFSNYGMYWVRQAPGKGLEWVAVIWYDGSNKYYADSVKGRFTISRDNSKNTLYLQMNSLRAEDTAVYYCARDLWGWYFDYWGQGTLVTVSSASTKGPSVFPLAPSSKSTSGGTAALGCLVKDYFPEPVTVSWNSGALTSGVHTFPAVLQSSGLYSLSSVVTVPSSSLGTQTYICNVNHKPSNTKVDKKVEPKSCDKTHTCPPCPAPELLGGPSVFLFPPKPKDTLMISRTPEVTCVVVDVSHEDPEVKFNWYVDGVEVHNAKTKPREEQYNSTYRVVSVLTVLHQDWLNGKEYKCKVSNKALPAPIEKTISKAKGQPREPQVYTLPPSREEMTKNQVSLTCLVKGFYPSDIAVEWESNGQPENNYKTTPPVLDSDGSFFLYSKLTVDKSRWQQGNVFSCSVMHEALHNHYTQKSLSLSPGGGGGSGGGGSQAQLVQSGAEVVKPGASVKMSCKASGYTFTSYNMHWVKQTPGQGLEWIGYIYPGNGATNYNQKFQGKATLTADPSSSTAYMQISSLTSEDSAVYFCARGDSVPFAYWGQGTLVTVSAGGGGSGGGGSGGGGSGGGGSEIVLTQSPATMSASPGERVTITCSAHSSVSFMHWFQQKPGTSPKLWIYSTSSLASGVPARFGGSGSGTSYSLTISSMEAEDAATYYCQQRSSFPLTFGAGTKLELK

SEQ ID NO: 530 - protein, 701 aa, Artificial Sequence
  Description of Artificial Sequence: Synthetic polypeptide
QAQLVQSGAEVVKPGASVKMSCKASGYTFTSYNMHWVKQTPGQGLEWIGYIYPGNGATNYNQKFQGKATLTADPSSSTAYMQISSLTSEDSAVYFCARGDSVPFAYWGQGTLVTVSAASTKGPSVFPLAPSSKSTSGGTAALGCLVKDYFPEPVTVSWNSGALTSGVHTFPAVLQSSGLYSLSSVVTVPSSSLGTQTYICNVNHKPSNTKVDKKVEPKSCDKTHTCPPCPAPELLGGPSVFLFPPKPKDTLMISRTPEVTCVVVDVSHEDPEVKFNWYVDGVEVHNAKTKPREEQYNSTYRVVSVLTVLHQDWLNGKEYKCKVSNKALPAPIEKTISKAKGQPREPQVYTLPPSREEMTKNQVSLTCLVKGFYPSDIAVEWESNGQPENNYKTTPPVLDSDGSFFLYSKLTVDKSRWQQGNVFSCSVMHEALHNHYTQKSLSLSPGGGGGSGGGGSQVQLVESGGGVVQPGRSLRLSCAASGFTFSNYGMYWVRQAPGKGLEWVAVIWYDGSNKYYADSVKGRFTISRDNSKNTLYLQMNSLRAEDTAVYYCARDLWGWYFDYWGQGTLVTVSSGGGGSGGGGSGGGGSGGGGSEIVLTQSPATLSLSPGERATLSCRASQSVSSYLAWYQQKPGQAPRLLIYDASNRATGIPARFSGSGSGTDFTLTISSLEPEDFAVYYCQQRRNWPLTFGGGTKVEIK

SEQ ID NO: 531 - protein, 709 aa, Artificial Sequence
  Description of Artificial Sequence: Synthetic polypeptide
QVQLVESGGGVVQPGRSLRLSCAASGFTFSNYGMYWVRQAPGKGLEWVAVIWYDGSNKYYADSVKGRFTISRDNSKNTLYLQMNSLRAEDTAVYYCARDLWGWYFDYWGQGTLVTVSSASTKGPSVFPLAPSSKSTSGGTAALGCLVKDYFPEPVTVSWNSGALTSGVHTFPAVLQSSGLYSLSSVVTVPSSSLGTQTYICNVNHKPSNTKVDKKVEPKSCDKTHTCPPCPAPELLGGPSVFLFPPKPKDTLMISRTPEVTCVVVDVSHEDPEVKFNWYVDGVEVHNAKTKPREEQYNSTYRVVSVLTVLHQDWLNGKEYKCKVSNKALPAPIEKTISKAKGQPREPQVYTLPPSREEMTKNQVSLTCLVKGFYPSDIAVEWESNGQPENNYKTTPPVLDSDGSFFLYSKLTVDKSRWQQGNVFSCSVMHEALHNHYTQKSLSLSPGGGGGSGGGGSEVQLVESGGGLVQPGGSLRLSCAASGFSFSDFAMSWVRQAPGKGLEWVATIGRVAFHTYYPDSMKGRFTISRDNSKNTLYLQMNSLRAEDTAVYYCARHRGFDVGHFDFWGQGTLVTVSSGGGGSGGGGSGGGGSGGGGSDIQMTQSPSSLSASVGDRVTITCRSSETLVHSSGNTYLEWYQQKPGKAPKLLIYRVSNRFSGVPSRFSGSGSGTDFTLTISSLQPEDFATYYCFQGSFNPLTFGQGTKVEIK

SEQ ID NO: 532 - protein, 704 aa, Artificial Sequence
  Description of Artificial Sequence: Synthetic polypeptide
EVQLVESGGGLVQPGGSLRLSCAASGFSFSDFAMSWVRQAPGKGLEWVATIGRVAFHTYYPDSMKGRFTISRDNSKNTLYLQMNSLRAEDTAVYYCARHRGFDVGHFDFWGQGTLVTVSSASTKGPSVFPLAPSSKSTSGGTAALGCLVKDYFPEPVTVSWNSGALTSGVHTFPAVLQSSGLYSLSSVVTVPSSSLGTQTYICNVNHKPSNTKVDKKVEPKSCDKTHTCPPCPAPELLGGPSVFLFPPKPKDTLMISRTPEVTCVVVDVSHEDPEVKFNWYVDGVEVHNAKTKPREEQYNSTYRVVSVLTVLHQDWLNGKEYKCKVSNKALPAPIEKTISKAKGQPREPQVYTLPPSREEMTKNQVSLTCLVKGFYPSDIAVEWESNGQPENNYKTTPPVLDSDGSFFLYSKLTVDKSRWQQGNVFSCSVMHEALHNHYTQKSLSLSPGGGGGSGGGGSQVQLVESGGGVVQPGRSLRLSCAASGFTFSNYGMYWVRQAPGKGLEWVAVIWYDGSNKYYADSVKGRFTISRDNSKNTLYLQMNSLRAEDTAVYYCARDLWGWYFDYWGQGTLVTVSSGGGGSGGGGSGGGGSGGGGSEIVLTQSPATLSLSPGERATLSCRASQSVSSYLAWYQQKPGQAPRLLIYDASNRATGIPARFSGSGSGTDFTLTISSLEPEDFAVYYCQQRRNWPLTFGGGTKVEIK

SEQ ID NO: 533 - protein, 705 aa, Artificial Sequence
  Description of Artificial Sequence: Synthetic polypeptide
QVQLVESGGGVVQPGRSLRLSCAASGFTFSNYGMYWVRQAPGKGLEWVAVIWYDGSNKYYADSVKGRFTISRDNSKNTLYLQMNSLRAEDTAVYYCARDLWGWYFDYWGQGTLVTVSSASTKGPSVFPLAPSSKSTSGGTAALGCLVKDYFPEPVTVSWNSGALTSGVHTFPAVLQSSGLYSLSSVVTVPSSSLGTQTYICNVNHKPSNTKVDKKVEPKSCDKTHTCPPCPAPELLGGPSVFLFPPKPKDTLMISRTPEVTCVVVDVSHEDPEVKFNWYVDGVEVHNAKTKPREEQYNSTYRVVSVLTVLHQDWLNGKEYKCKVSNKALPAPIEKTISKAKGQPREPQVYTLPPSREEMTKNQVSLTCLVKGFYPSDIAVEWESNGQPENNYKTTPPVLDSDGSFFLYSKLTVDKSRWQQGNVFSCSVMHEALHNHYTQKSLSLSPGGGGGSGGGGSQVQLQQSGSELKKPGASVKVSCKASGYTFTNYGMNWVKQAPGQGLKWMGWINTYTGEPTYTDDFKGRFAFSLDTSVSTAYLQISSLKADDTAVYFCARGGFGSSYWYFDVWGQGSLVTVSSGGGGSGGGGSGGGGSGGGGSDIQLTQSPSSLSASVGDRVSITCKASQDVSIAVAWYQQKPGKAPKLLIYSASYRYTGVPDRFSGSGSGTDFTLTISSLQPEDFAVYYCQQHYITPLTFGAGTKVEIK

SEQ ID NO: 534 - protein, 705 aa, Artificial Sequence
  Description of Artificial Sequence: Synthetic polypeptide
QVQLQQSGSELKKPGASVKVSCKASGYTFTNYGMNWVKQAPGQGLKWMGWINTYTGEPTYTDDFKGRFAFSLDTSVSTAYLQISSLKADDTAVYFCARGGFGSSYWYFDVWGQGSLVTVSSASTKGPSVFPLAPSSKSTSGGTAALGCLVKDYFPEPVTVSWNSGALTSGVHTFPAVLQSSGLYSLSSVVTVPSSSLGTQTYICNVNHKPSNTKVDKKVEPKSCDKTHTCPPCPAPELLGGPSVFLFPPKPKDTLMISRTPEVTCVVVDVSHEDPEVKFNWYVDGVEVHNAKTKPREEQYNSTYRVVSVLTVLHQDWLNGKEYKCKVSNKALPAPIEKTISKAKGQPREPQVYTLPPSREEMTKNQVSLTCLVKGFYPSDIAVEWESNGQPENNYKTTPPVLDSDGSFFLYSKLTVDKSRWQQGNVFSCSVMHEALHNHYTQKSLSLSPGGGGGSGGGGSQVQLVESGGGVVQPGRSLRLSCAASGFTFSNYGMYWVRQAPGKGLEWVAVIWYDGSNKYYADSVKGRFTISRDNSKNTLYLQMNSLRAEDTAVYYCARDLWGWYFDYWGQGTLVTVSSGGGGSGGGGSGGGGSGGGGSEIVLTQSPATLSLSPGERATLSCRASQSVSSYLAWYQQKPGQAPRLLIYDASNRATGIPARFSGSGSGTDFTLTISSLEPEDFAVYYCQQRRNWPLTFGGGTKVEIK

SEQ ID NO: 535 - protein, 706 aa, Artificial Sequence
  Description of Artificial Sequence: Synthetic polypeptide
QVQLVESGGGVVQPGRSLRLSCAASGFTFSNYGMYWVRQAPGKGLEWVAVIWYDGSNKYYADSVKGRFTISRDNSKNTLYLQMNSLRAEDTAVYYCARDLWGWYFDYWGQGTLVTVSSASTKGPSVFPLAPSSKSTSGGTAALGCLVKDYFPEPVTVSWNSGALTSGVHTFPAVLQSSGLYSLSSVVTVPSSSLGTQTYICNVNHKPSNTKVDKKVEPKSCDKTHTCPPCPAPELLGGPSVFLFPPKPKDTLMISRTPEVTCVVVDVSHEDPEVKFNWYVDGVEVHNAKTKPREEQYNSTYRVVSVLTVLHQDWLNGKEYKCKVSNKALPAPIEKTISKAKGQPREPQVYTLPPSREEMTKNQVSLTCLVKGFYPSDIAVEWESNGQPENNYKTTPPVLDSDGSFFLYSKLTVDKSRWQQGNVFSCSVMHEALHNHYTQKSLSLSPGGGGGSGGGGSQVKLQQSGPELKKPGETVKISCKASGYTFTEFGMNWVKQAPGKGLKWMGWINTKTGEATYVEEFKGRFAFSLETSATTAYLQINNLKNEDTAKYFCARWDFYDYVEAMDYWGQGTTVTVSSGGGGSGGGGSGGGGSGGGGSDIVMTQSQRFMSTSVGDRVSVTCKASQNVGTNVAWYQQKPGQSPKALIYSASYRYSGVPDRFTGSGSGTDFTLTISNVQSEDLAEYFCHQYYTYPLFTFGSGTKLEMK

SEQ ID NO: 536 - protein, 705 aa, Artificial Sequence
  Description of Artificial Sequence: Synthetic polypeptide
QVKLQQSGPELKKPGETVKISCKASGYTFTEFGMNWVKQAPGKGLKWMGWINTKTGEATYVEEFKGRFAFSLETSATTAYLQINNLKNEDTAKYFCARWDFYDYVEAMDYWGQGTTVTVSSASTKGPSVFPLAPSSKSTSGGTAALGCLVKDYFPEPVTVSWNSGALTSGVHTFPAVLQSSGLYSLSSVVTVPSSSLGTQTYICNVNHKPSNTKVDKKVEPKSCDKTHTCPPCPAPELLGGPSVFLFPPKPKDTLMISRTPEVTCVVVDVSHEDPEVKFNWYVDGVEVHNAKTKPREEQYNSTYRVVSVLTVLHQDWLNGKEYKCKVSNKALPAPIEKTISKAKGQPREPQVYTLPPSREEMTKNQVSLTCLVKGFYPSDIAVEWESNGQPENNYKTTPPVLDSDGSFFLYSKLTVDKSRWQQGNVFSCSVMHEALHNHYTQKSLSLSPGGGGGSGGGGSQVQLVESGGGVVQPGRSLRLSCAASGFTFSNYGMYWVRQAPGKGLEWVAVIWYDGSNKYYADSVKGRFTISRDNSKNTLYLQMNSLRAEDTAVYYCARDLWGWYFDYWGQGTLVTVSSGGGGSGGGGSGGGGSGGGGSEIVLTQSPATLSLSPGERATLSCRASQSVSSYLAWYQQKPGQAPRLLIYDASNRATGIPARFSGSGSGTDFTLTISSLEPEDFAVYYCQQRRNWPLTFGGGTKVEIK

SEQ ID NO: 537 - protein, 708 aa, Artificial Sequence
  Description of Artificial Sequence: Synthetic polypeptide
QVQLVESGGGVVQPGRSLRLSCAASGFTFSNYGMYWVRQAPGKGLEWVAVIWYDGSNKYYADSVKGRFTISRDNSKNTLYLQMNSLRAEDTAVYYCARDLWGWYFDYWGQGTLVTVSSASTKGPSVFPLAPSSKSTSGGTAALGCLVKDYFPEPVTVSWNSGALTSGVHTFPAVLQSSGLYSLSSVVTVPSSSLGTQTYICNVNHKPSNTKVDKKVEPKSCDKTHTCPPCPAPELLGGPSVFLFPPKPKDTLMISRTPEVTCVVVDVSHEDPEVKFNWYVDGVEVHNAKTKPREEQYNSTYRVVSVLTVLHQDWLNGKEYKCKVSNKALPAPIEKTISKAKGQPREPQVYTLPPSREEMTKNQVSLTCLVKGFYPSDIAVEWESNGQPENNYKTTPPVLDSDGSFFLYSKLTVDKSRWQQGNVFSCSVMHEALHNHYTQKSLSLSPGGGGGSGGGGSQVQLQQPGAELVRPGASVKLSCKASGYTFTSYWINWVKQRPGQGLEWIGNIYPSDSYTNYNQKFKDKATLTVDKSSSTAYMQLSSPTSEDSAVYYCTRSWRGNSFDYWGQGTTLTVSSGGGGSGGGGSGGGGSGGGGSDIVMTQSPSSLTVTAGEKVTMSCKSSQSLLNSGNQKNYLTWYQQKPGQPPKLLIYWASTRESGVPDRFTGSGSGTDFTLTISSVQAEDLAVYYCQNDYSYPFTFGSGTKLEIK

SEQ ID NO: 538 - protein, 702 aa, Artificial Sequence
  Description of Artificial Sequence: Synthetic polypeptide
QVQLQQPGAELVRPGASVKLSCKASGYTFTSYWINWVKQRPGQGLEWIGNIYPSDSYTNYNQKFKDKATLTVDKSSSTAYMQLSSPTSEDSAVYYCTRSWRGNSFDYWGQGTTLTVSSASTKGPSVFPLAPSSKSTSGGTAALGCLVKDYFPEPVTVSWNSGALTSGVHTFPAVLQSSGLYSLSSVVTVPSSSLGTQTYICNVNHKPSNTKVDKKVEPKSCDKTHTCPPCPAPELLGGPSVFLFPPKPKDTLMISRTPEVTCVVVDVSHEDPEVKFNWYVDGVEVHNAKTKPREEQYNSTYRVVSVLTVLHQDWLNGKEYKCKVSNKALPAPIEKTISKAKGQPREPQVYTLPPSREEMTKNQVSLTCLVKGFYPSDIAVEWESNGQPENNYKTTPPVLDSDGSFFLYSKLTVDKSRWQQGNVFSCSVMHEALHNHYTQKSLSLSPGGGGGSGGGGSQVQLVESGGGVVQPGRSLRLSCAASGFTFSNYGMYWVRQAPGKGLEWVAVIWYDGSNKYYADSVKGRFTISRDNSKNTLYLQMNSLRAEDTAVYYCARDLWGWYFDYWGQGTLVTVSSGGGGSGGGGSGGGGSGGGGSEIVLTQSPATLSLSPGERATLSCRASQSVSSYLAWYQQKPGQAPRLLIYDASNRATGIPARFSGSGSGTDFTLTISSLEPEDFAVYYCQQRRNWPLTFGGGTKVEIK

SEQ ID NO: 539 - protein, 713 aa, Artificial Sequence
  Description of Artificial Sequence: Synthetic polypeptide
QVQLVESGGGVVQPGRSLRLSCAASGFTFSNYGMYWVRQAPGKGLEWVAVIWYDGSNKYYADSVKGRFTISRDNSKNTLYLQMNSLRAEDTAVYYCARDLWGWYFDYWGQGTLVTVSSASTKGPSVFPLAPSSKSTSGGTAALGCLVKDYFPEPVTVSWNSGALTSGVHTFPAVLQSSGLYSLSSVVTVPSSSLGTQTYICNVNHKPSNTKVDKKVEPKSCDKTHTCPPCPAPELLGGPSVFLFPPKPKDTLMISRTPEVTCVVVDVSHEDPEVKFNWYVDGVEVHNAKTKPREEQYNSTYRVVSVLTVLHQDWLNGKEYKCKVSNKALPAPIEKTISKAKGQPREPQVYTLPPSREEMTKNQVSLTCLVKGFYPSDIAVEWESNGQPENNYKTTPPVLDSDGSFFLYSKLTVDKSRWQQGNVFSCSVMHEALHNHYTQKSLSLSPGGGGGSGGGGSQVQLVESGGGVVQSGRSLRLSCAASGFTFRNYGMHWVRQAPGKGLEWVAVIWYDGSDKYYADSVRGRFTISRDNSKNTLYLQMNSLRAEDTAVYYCARDGYDILTGNPRDFDYWGQGTLVTVSSGGGGSGGGGSGGGGSGGGGSDTVMTQTPLSSHVTLGQPASISCRSSQSLVHSDGNTYLSWLQQRPGQPPRLLIYRISRRFSGVPDRFSGSGAGTDFTLEISRVEAEDVGVYYCMQSTHVPRTFGQGTKVEIK

SEQ ID NO: 540 - protein, 708 aa, Artificial Sequence
  Description of Artificial Sequence: Synthetic polypeptide
QVQLVESGGGVVQSGRSLRLSCAASGFTFRNYGMHWVRQAPGKGLEWVAVIWYDGSDKYYADSVRGRFTISRDNSKNTLYLQMNSLRAEDTAVYYCARDGYDILTGNPRDFDYWGQGTLVTVSSASTKGPSVFPLAPSSKSTSGGTAALGCLVKDYFPEPVTVSWNSGALTSGVHTFPAVLQSSGLYSLSSVVTVPSSSLGTQTYICNVNHKPSNTKVDKKVEPKSCDKTHTCPPCPAPELLGGPSVFLFPPKPKDTLMISRTPEVTCVVVDVSHEDPEVKFNWYVDGVEVHNAKTKPREEQYNSTYRVVSVLTVLHQDWLNGKEYKCKVSNKALPAPIEKTISKAKGQPREPQVYTLPPSREEMTKNQVSLTCLVKGFYPSDIAVEWESNGQPENNYKTTPPVLDSDGSFFLYSKLTVDKSRWQQGNVFSCSVMHEALHNHYTQKSLSLSPGGGGGSGGGGSQVQLVESGGGVVQPGRSLRLSCAASGFTFSNYGMYWVRQAPGKGLEWVAVIWYDGSNKYYADSVKGRFTISRDNSKNTLYLQMNSLRAEDTAVYYCARDLWGWYFDYWGQGTLVTVSSGGGGSGGGGSGGGGSGGGGSEIVLTQSPATLSLSPGERATLSCRASQSVSSYLAWYQQKPGQAPRLLIYDASNRATGIPARFSGSGSGTDFTLTISSLEPEDFAVYYCQQRRNWPLTFGGGTKVEIK

SEQ ID NO: 541 - protein, 700 aa, Artificial Sequence
  Description of Artificial Sequence: Synthetic polypeptide
QVQLVESGGGVVQPGRSLRLSCAASGFTFSNYGMYWVRQAPGKGLEWVAVIWYDGSNKYYADSVKGRFTISRDNSKNTLYLQMNSLRAEDTAVYYCARDLWGWYFDYWGQGTLVTVSSASTKGPSVFPLAPSSKSTSGGTAALGCLVKDYFPEPVTVSWNSGALTSGVHTFPAVLQSSGLYSLSSVVTVPSSSLGTQTYICNVNHKPSNTKVDKKVEPKSCDKTHTCPPCPAPELLGGPSVFLFPPKPKDTLMISRTPEVTCVVVDVSHEDPEVKFNWYVDGVEVHNAKTKPREEQYNSTYRVVSVLTVLHQDWLNGKEYKCKVSNKALPAPIEKTISKAKGQPREPQVYTLPPSREEMTKNQVSLTCLVKGFYPSDIAVEWESNGQPENNYKTTPPVLDSDGSFFLYSKLTVDKSRWQQGNVFSCSVMHEALHNHYTQKSLSLSPGGGGGSGGGGSEVQLQESGPGLVKPSQTLSLTCTVSGYSISRDFAWNWIRQPPGKGLEWMGYISYNGNTRYQPSLKSRITISRDTSKNQFFLKLNSVTAADTATYYCVTASRGFPYWGQGTLVTVSSGGGGSGGGGSGGGGSGGGGSDIQMTQSPSSMSVSVGDRVTITCHSSQDINSNIGWLQQKPGKSFKGLIYHGTNLDDGVPSRFSGSGSGTDYTLTISSLQPEDFATYYCVQYAQFPWTFGGGTKLEIK

SEQ ID NO: 542 - protein, 700 aa, Artificial Sequence
  Description of Artificial Sequence: Synthetic polypeptide
EVQLQESGPGLVKPSQTLSLTCTVSGYSISRDFAWNWIRQPPGKGLEWMGYISYNGNTRYQPSLKSRITISRDTSKNQFFLKLNSVTAADTATYYCVTASRGFPYWGQGTLVTVSSASTKGPSVFPLAPSSKSTSGGTAALGCLVKDYFPEPVTVSWNSGALTSGVHTFPAVLQSSGLYSLSSVVTVPSSSLGTQTYICNVNHKPSNTKVDKKVEPKSCDKTHTCPPCPAPELLGGPSVFLFPPKPKDTLMISRTPEVTCVVVDVSHEDPEVKFNWYVDGVEVHNAKTKPREEQYNSTYRVVSVLTVLHQDWLNGKEYKCKVSNKALPAPIEKTISKAKGQPREPQVYTLPPSREEMTKNQVSLTCLVKGFYPSDIAVEWESNGQPENNYKTTPPVLDSDGSFFLYSKLTVDKSRWQQGNVFSCSVMHEALHNHYTQKSLSLSPGGGGGSGGGGSQVQLVESGGGVVQPGRSLRLSCAASGFTFSNYGMYWVRQAPGKGLEWVAVIWYDGSNKYYADSVKGRFTISRDNSKNTLYLQMNSLRAEDTAVYYCARDLWGWYFDYWGQGTLVTVSSGGGGSGGGGSGGGGSGGGGSEIVLTQSPATLSLSPGERATLSCRASQSVSSYLAWYQQKPGQAPRLLIYDASNRATGIPARFSGSGSGTDFTLTISSLEPEDFAVYYCQQRRNWPLTFGGGTKVEIK

SEQ ID NO: 543 - protein, 714 aa, Artificial Sequence
  Description of Artificial Sequence: Synthetic polypeptide
QVQLVESGGGVVQPGRSLRLSCAASGFTFSNYGMYWVRQAPGKGLEWVAVIWYDGSNKYYADSVKGRFTISRDNSKNTLYLQMNSLRAEDTAVYYCARDLWGWYFDYWGQGTLVTVSSASTKGPSVFPLAPSSKSTSGGTAALGCLVKDYFPEPVTVSWNSGALTSGVHTFPAVLQSSGLYSLSSVVTVPSSSLGTQTYICNVNHKPSNTKVDKKVEPKSCDKTHTCPPCPAPELLGGPSVFLFPPKPKDTLMISRTPEVTCVVVDVSHEDPEVKFNWYVDGVEVHNAKTKPREEQYNSTYRVVSVLTVLHQDWLNGKEYKCKVSNKALPAPIEKTISKAKGQPREPQVYTLPPSREEMTKNQVSLTCLVKGFYPSDIAVEWESNGQPENNYKTTPPVLDSDGSFFLYSKLTVDKSRWQQGNVFSCSVMHEALHNHYTQKSLSLSPGGGGGSGGGGSQVQLVQSGAEVKKPGASVKVSCKTSRYTFTEYTIHWVRQAPGQRLEWIGGINPNNGIPNYNQKFKGRVTITVDTSASTAYMELSSLRSEDTAVYYCARRRIAYGYDEGHAMDYWGQGTLVTVSSGGGGSGGGGSGGGGSGGGGSDIVMTQSPDSLAVSLGERATINCKSSQSLLYSRNQKNYLAWYQQKPGQPPKLLIFWASTRESGVPDRFSGSGFGTDFTLTISSLQAEDVAVYYCQQYFSYPLTFGQGTKVEIK

SEQ ID NO: 544 - protein, 708 aa, Artificial Sequence
  Description of Artificial Sequence: Synthetic polypeptide
QVQLVQSGAEVKKPGASVKVSCKTSRYTFTEYTIHWVRQAPGQRLEWIGGINPNNGIPNYNQKFKGRVTITVDTSASTAYMELSSLRSEDTAVYYCARRRIAYGYDEGHAMDYWGQGTLVTVSSASTKGPSVFPLAPSSKSTSGGTAALGCLVKDYFPEPVTVSWNSGALTSGVHTFPAVLQSSGLYSLSSVVTVPSSSLGTQTYICNVNHKPSNTKVDKKVEPKSCDKTHTCPPCPAPELLGGPSVFLFPPKPKDTLMISRTPEVTCVVVDVSHEDPEVKFNWYVDGVEVHNAKTKPREEQYNSTYRVVSVLTVLHQDWLNGKEYKCKVSNKALPAPIEKTISKAKGQPREPQVYTLPPSREEMTKNQVSLTCLVKGFYPSDIAVEWESNGQPENNYKTTPPVLDSDGSFFLYSKLTVDKSRWQQGNVFSCSVMHEALHNHYTQKSLSLSPGGGGGSGGGGSQVQLVESGGGVVQPGRSLRLSCAASGFTFSNYGMYWVRQAPGKGLEWVAVIWYDGSNKYYADSVKGRFTISRDNSKNTLYLQMNSLRAEDTAVYYCARDLWGWYFDYWGQGTLVTVSSGGGGSGGGGSGGGGSGGGGSEIVLTQSPATLSLSPGERATLSCRASQSVSSYLAWYQQKPGQAPRLLIYDASNRATGIPARFSGSGSGTDFTLTISSLEPEDFAVYYCQQRRNWPLTFGGGTKVEIK

SEQ ID NO: 545 - protein, 708 aa, Artificial Sequence
  Description of Artificial Sequence: Synthetic polypeptide
QVQLVESGGGVVQPGRSLRLSCAASGFTFSNYGMYWVRQAPGKGLEWVAVIWYDGSNKYYADSVKGRFTISRDNSKNTLYLQMNSLRAEDTAVYYCARDLWGWYFDYWGQGTLVTVSSASTKGPSVFPLAPSSKSTSGGTAALGCLVKDYFPEPVTVSWNSGALTSGVHTFPAVLQSSGLYSLSSVVTVPSSSLGTQTYICNVNHKPSNTKVDKKVEPKSCDKTHTCPPCPAPELLGGPSVFLFPPKPKDTLMISRTPEVTCVVVDVSHEDPEVKFNWYVDGVEVHNAKTKPREEQYNSTYRVVSVLTVLHQDWLNGKEYKCKVSNKALPAPIEKTISKAKGQPREPQVYTLPPSREEMTKNQVSLTCLVKGFYPSDIAVEWESNGQPENNYKTTPPVLDSDGSFFLYSKLTVDKSRWQQGNVFSCSVMHEALHNHYTQKSLSLSPGGGGGSGGGGSQVQLVQSGAEVKKPGASVKVSCKASGYTFIDYSMHWVRQAPGQGLEWMGWINTYTGEPTYSDDFKGRVTITADTSTSTAYLELSSLRSEDTAVYYCATYYRYERDFDYWGQGTLVTVSSGGGGSGGGGSGGGGSGGGGSDIVMTQSPLSLPVTPGEPASISCRSSQSIVHSSGITYLEWYLQKPGQSPQLLIYKVSNRFSGVPDRFSGSGSGTDFTLKISRVEAEDVGVYYCFQGSHVPYTFGQGTKVEIK

SEQ ID NO: 546 - protein, 703 aa, Artificial Sequence
  Description of Artificial Sequence: Synthetic polypeptide
QVQLVQSGAEVKKPGASVKVSCKASGYTFIDYSMHWVRQAPGQGLEWMGWINTYTGEPTYSDDFKGRVTITADTSTSTAYLELSSLRSEDTAVYYCATYYRYERDFDYWGQGTLVTVSSASTKGPSVFPLAPSSKSTSGGTAALGCLVKDYFPEPVTVSWNSGALTSGVHTFPAVLQSSGLYSLSSVVTVPSSSLGTQTYICNVNHKPSNTKVDKKVEPKSCDKTHTCPPCPAPELLGGPSVFLFPPKPKDTLMISRTPEVTCVVVDVSHEDPEVKFNWYVDGVEVHNAKTKPREEQYNSTYRVVSVLTVLHQDWLNGKEYKCKVSNKALPAPIEKTISKAKGQPREPQVYTLPPSREEMTKNQVSLTCLVKGFYPSDIAVEWESNGQPENNYKTTPPVLDSDGSFFLYSKLTVDKSRWQQGNVFSCSVMHEALHNHYTQKSLSLSPGGGGGSGGGGSQVQLVESGGGVVQPGRSLRLSCAASGFTFSNYGMYWVRQAPGKGLEWVAVIWYDGSNKYYADSVKGRFTISRDNSKNTLYLQMNSLRAEDTAVYYCARDLWGWYFDYWGQGTLVTVSSGGGGSGGGGSGGGGSGGGGSEIVLTQSPATLSLSPGERATLSCRASQSVSSYLAWYQQKPGQAPRLLIYDASNRATGIPARFSGSGSGTDFTLTISSLEPEDFAVYYCQQRRNWPLTFGGGTKVEIK

SEQ ID NO: 547 - protein, 707 aa, Artificial Sequence
  Description of Artificial Sequence: Synthetic polypeptide
QVQLVESGGGVVQPGRSLRLSCAASGFTFSNYGMYWVRQAPGKGLEWVAVIWYDGSNKYYADSVKGRFTISRDNSKNTLYLQMNSLRAEDTAVYYCARDLWGWYFDYWGQGTLVTVSSASTKGPSVFPLAPSSKSTSGGTAALGCLVKDYFPEPVTVSWNSGALTSGVHTFPAVLQSSGLYSLSSVVTVPSSSLGTQTYICNVNHKPSNTKVDKKVEPKSCDKTHTCPPCPAPELLGGPSVFLFPPKPKDTLMISRTPEVTCVVVDVSHEDPEVKFNWYVDGVEVHNAKTKPREEQYNSTYRVVSVLTVLHQDWLNGKEYKCKVSNKALPAPIEKTISKAKGQPREPQVYTLPPSREEMTKNQVSLTCLVKGFYPSDIAVEWESNGQPENNYKTTPPVLDSDGSFFLYSKLTVDKSRWQQGNVFSCSVMHEALHNHYTQKSLSLSPGGGGGSGGGGSQIQLVQSGAEVKKPGASVKVSCKASGYTFIDYSMHWVRQAPGQGLKWMGWINTYTGEPTYSDDFKGRFAFSLDTSTSTAYLELSSLRSEDTAVYYCATYYRYERDFDYWGQGTLVTVSSGGGGSGGGGSGGGSGGGGSDVLMTQSPLSLPVTPGEPASISCRSSQSIVHSSGITYLEWYLQKPGQSPQLLIYKVSNRFSGVPDRFSGSGSGTDFTLKISRVEAEDVGVYYCFQGSHVPYTFGQGTKVEIK

SEQ ID NO: 548 - protein, 703 aa, Artificial Sequence
  Description of Artificial Sequence: Synthetic polypeptide
QIQLVQSGAEVKKPGASVKVSCKASGYTFIDYSMHWVRQAPGQGLKWMGWINTYTGEPTYSDDFKGRFAFSLDTSTSTAYLELSSLRSEDTAVYYCATYYRYERDFDYWGQGTLVTVSSASTKGPSVFPLAPSSKSTSGGTAALGCLVKDYFPEPVTVSWNSGALTSGVHTFPAVLQSSGLYSLSSVVTVPSSSLGTQTYICNVNHKPSNTKVDKKVEPKSCDKTHTCPPCPAPELLGGPSVFLFPPKPKDTLMISRTPEVTCVVVDVSHEDPEVKFNWYVDGVEVHNAKTKPREEQYNSTYRVVSVLTVLHQDWLNGKEYKCKVSNKALPAPIEKTISKAKGQPREPQVYTLPPSREEMTKNQVSLTCLVKGFYPSDIAVEWESNGQPENNYKTTPPVLDSDGSFFLYSKLTVDKSRWQQGNVFSCSVMHEALHNHYTQKSLSLSPGGGGGSGGGGSQVQLVESGGGVVQPGRSLRLSCAASGFTFSNYGMYWVRQAPGKGLEWVAVIWYDGSNKYYADSVKGRFTISRDNSKNTLYLQMNSLRAEDTAVYYCARDLWGWYFDYWGQGTLVTVSSGGGGGSGGGGSGGGSGGGGSEIVLTQSPATLSLSPGERATLSCRASQSVSSYLAWYQQKPGQAPRLLIYDASNRATGIPARFSGSGSGTDFTLTISSLEPEDFAVYYCQQRRNWPLTFGGGTKVEIK

SEQ ID NO: 549 - protein, 712 aa, Artificial Sequence
  Description of Artificial Sequence: Synthetic polypeptide
QVQLVESGGGVVQPGRSLRLSCAASGFTFSNYGMYWVRQAPGKGLEWVAVIWYDGSNKYYADSVKGRFTISRDNSKNTLYLQMNSLRAEDTAVYYCARDLWGWYFDYWGQGTLVTVSSASTKGPSVFPLAPSSKSTSGGTAALGCLVKDYFPEPVTVSWNSGALTSGVHTFPAVLQSSGLYSLSSVVTVPSSSLGTQTYICNVNHKPSNTKVDKKVEPKSCDKTHTCPPCPAPELLGGPSVFLFPPKPKDTLMISRTPEVTCVVVDVSHEDPEVKFNWYVDGVEVHNAKTKPREEQYNSTYRVVSVLTVLHQDWLNGKEYKCKVSNKALPAPIEKTISKAKGQPREPQVYTLPPSREEMTKNQVSLTCLVKGFYPSDIAVEWESNGQPENNYKTTPPVLDSDGSFFLYSKLTVDKSRWQQGNVFSCSVMHEALHNHYTQKSLSLSPGGGGGSGGGGSEVQLLESGGGLVQPGGSLRLSCAASGFTFSHYMMAWVRQAPGKGLEWVSRIGPSGGPTHYADSVKGRFTISRDNSKNTLYLQMNSLRAEDTAVYYCAGYDSGYDYVAVAGPAEYFQHWGQGTLVTVSSGGGGSGGGGSGGGGSGGGGSDIQMTQSPSSLSASVGDRVTITCRASQSISTWLAWYQQKPGKAPKLLIYKASNLHTGVPSRFSGSGSGTEFSLTISGLQPDDFATYYCQQYNSYSRTFGQGTKVEIK

SEQ ID NO: 550 - protein, 712 aa, Artificial Sequence
  Description of Artificial Sequence: Synthetic polypeptide
EVQLLESGGGLVQPGGSLRLSCAASGFTFSHYMMAWVRQAPGKGLEWVSRIGPSGGPTHYADSVKGRFTISRDNSKNTLYLQMNSLRAEDTAVYYCAGYDSGYDYVAVAGPAEYFQHWGQGTLVTVSSASTKGPSVFPLAPSSKSTSGGTAALGCLVKDYFPEPVTVSWNSGALTSGVHTFPAVLQSSGLYSLSSVVTVPSSSLGTQTYICNVNHKPSNTKVDKKVEPKSCDKTHTCPPCPAPELLGGPSVFLFPPKPKDTLMISRTPEVTCVVVDVSHEDPEVKFNWYVDGVEVHNAKTKPREEQYNSTYRVVSVLTVLHQDWLNGKEYKCKVSNKALPAPIEKTISKAKGQPREPQVYTLPPSREEMTKNQVSLTCLVKGFYPSDIAVEWESNGQPENNYKTTPPVLDSDGSFFLYSKLTVDKSRWQQGNVFSCSVMHEALHNHYTQKSLSLSPGGGGGSGGGGSQVQLVESGGGVVQPGRSLRLSCAASGFTFSNYGMYWVRQAPGKGLEWVAVIWYDGSNKYYADSVKGRFTISRDNSKNTLYLQMNSLRAEDTAVYYCARDLWGWYFDYWGQGTLVTVSSGGGGSGGGGSGGGGSGGGGSEIVLTQSPATLSLSPGERATLSCRASQSVSSYLAWYQQKPGQAPRLLIYDASNRATGIPARFSGSGSGTDFTLTISSLEPEDFAVYYCQQRRNWPLTFGGGTKVEIK

SEQ ID NO: 551 - protein, 706 aa, Artificial Sequence
  Description of Artificial Sequence: Synthetic polypeptide
QVQLVESGGGVVQPGRSLRLSCAASGFTFSNYGMYWVRQAPGKGLEWVAVIWYDGSNKYYADSVKGRFTISRDNSKNTLYLQMNSLRAEDTAVYYCARDLWGWYFDYWGQGTLVTVSSASTKGPSVFPLAPSSKSTSGGTAALGCLVKDYFPEPVTVSWNSGALTSGVHTFPAVLQSSGLYSLSSVVTVPSSSLGTQTYICNVNHKPSNTKVDKKVEPKSCDKTHTCPPCPAPELLGGPSVFLFPPKPKDTLMISRTPEVTCVVVDVSHEDPEVKFNWYVDGVEVHNAKTKPREEQYNSTYRVVSVLTVLHQDWLNGKEYKCKVSNKALPAPIEKTISKAKGQPREPQVYTLPPSREEMTKNQVSLTCLVKGFYPSDIAVEWESNGQPENNYKTTPPVLDSDGSFFLYSKLTVDKSRWQQGNVFSCSVMHEALHNHYTQKSLSLSPGGGGGSGGGGSEVQLVESGGGLVQPGGSLRLSCAASGFTFSSYLMTWVRQAPGKGLEWVANIKQDGSEKYYVDSVKGRFTISRDNAKNSLNLQMNSLRAEDTAVYYCTRDGYSSGRHYGMDVWGQGTTVIVSSGGGGSGGGGSGGGGSGGGGSEIVLTQSPATLSLSPGERATLSCRASQSVSRYLAWYQQKPGQAPRLLIYDASNRATGIPARFSGSGSGTDFTLTISSLEPEDFAVYYCQQRSNWPRTFGQGTKVEIK

SEQ ID NO: 552 - protein, 706 aa, Artificial Sequence
  Description of Artificial Sequence: Synthetic polypeptide
EVQLVESGGGLVQPGGSLRLSCAASGFTFSSYLMTWVRQAPGKGLEWVANIKQDGSEKYYVDSVKGRFTISRDNAKNSLNLQMNSLRAEDTAVYYCTRDGYSSGRHYGMDVWGQGTTVIVSSASTKGPSVFPLAPSSKSTSGGTAALGCLVKDYFPEPVTVSWNSGALTSGVHTFPAVLQSSGLYSLSSVVTVPSSSLGTQTYICNVNHKPSNTKVDKKVEPKSCDKTHTCPPCPAPELLGGPSVFLFPPKPKDTLMISRTPEVTCVVVDVSHEDPEVKFNWYVDGVEVHNAKTKPREEQYNSTYRVVSVLTVLHQDWLNGKEYKCKVSNKALPAPIEKTISKAKGQPREPQVYTLPPSREEMTKNQVSLTCLVKGFYPSDIAVEWESNGQPENNYKTTPPVLDSDGSFFLYSKLTVDKSRWQQGNVFSCSVMHEALHNHYTQKSLSLSPGGGGGSGGGGSQVQLVESGGGVVQPGRSLRLSCAASGFTFSNYGMYWVRQAPGKGLEWVAVIWYDGSNKYYADSVKGRFTISRDNSKNTLYLQMNSLRAEDTAVYYCARDLWGWYFDYWGQGTLVTVSSGGGGSGGGGSGGGGSGGGGSEIVLTQSPATLSLSPGERATLSCRASQSVSSYLAWYQQKPGQAPRLLIYDASNRATGIPARFSGSGSGTDFTLTISSLEPEDFAVYYCQQRRNWPLTFGGGTKVEIK

SEQ ID NO: 553 - protein, 704 aa, Artificial Sequence
  Description of Artificial Sequence: Synthetic polypeptide
QVQLVESGGGVVQPGRSLRLSCAASGFTFSNYGMYWVRQAPGKGLEWVAVIWYDGSNKYYADSVKGRFTISRDNSKNTLYLQMNSLRAEDTAVYYCARDLWGWYFDYWGQGTLVTVSSASTKGPSVFPLAPSSKSTSGGTAALGCLVKDYFPEPVTVSWNSGALTSGVHTFPAVLQSSGLYSLSSVVTVPSSSLGTQTYICNVNHKPSNTKVDKKVEPKSCDKTHTCPPCPAPELLGGPSVFLFPPKPKDTLMISRTPEVTCVVVDVSHEDPEVKFNWYVDGVEVHNAKTKPREEQYNSTYRVVSVLTVLHQDWLNGKEYKCKVSNKALPAPIEKTISKAKGQPREPQVYTLPPSREEMTKNQVSLTCLVKGFYPSDIAVEWESNGQPENNYKTTPPVLDSDGSFFLYSKLTVDKSRWQQGNVFSCSVMHEALHNHYTQKSLSLSPGGGGGSGGGGSEVQLVESGPALVKPTQTLTLTCTVSGFSLTGYSVNWIRQPPGKALEWLGMIWGDGSTDYNSALKSRLTISKDTSKNQVVLTMTNMDPVDTATYYCARDYYFNYASWFAYWGQGTLVTVSSGGGGSGGGGSGGGGSGGGGSDIQMTQSPSSLSASVGDRVTITCSASQGISNYLNWYQQKPGKTVKLLIYYTSNLHSGVPSRFSGSGSGTDYTLTISSLQPEDFATYYCQQYSELPWTFGQGTKVEIK

SEQ ID NO: 554 - protein, 704 aa, Artificial Sequence
  Description of Artificial Sequence: Synthetic polypeptide
EVQLVESGPALVKPTQTLTLTCTVSGFSLTGYSVNWIRQPPGKALEWLGMIWGDGSTDYNSALKSRLTISKDTSKNQVVLTMTNMDPVDTATYYCARDYYFNYASWFAYWGQGTLVTVSSASTKGPSVFPLAPSSKSTSGGTAALGCLVKDYFPEPVTVSWNSGALTSGVHTFPAVLQSSGLYSLSSVVTVPSSSLGTQTYICNVNHKPSNTKVDKKVEPKSCDKTHTCPPCPAPELLGGPSVFLFPPKPKDTLMISRTPEVTCVVVDVSHEDPEVKFNWYVDGVEVHNAKTKPREEQYNSTYRVVSVLTVLHQDWLNGKEYKCKVSNKALPAPIEKTISKAKGQPREPQVYTLPPSREEMTKNQVSLTCLVKGFYPSDIAVEWESNGQPENNYKTTPPVLDSDGSFFLYSKLTVDKSRWQQGNVFSCSVMHEALHNHYTQKSLSLSPGGGGGSGGGGSQVQLVESGGGVVQPGRSLRLSCAASGFTFSNYGMYWVRQAPGKGLEWVAVIWYDGSNKYYADSVKGRFTISRDNSKNTLYLQMNSLRAEDTAVYYCARDLWGWYFDYWGQGTLVTVSSGGGGSGGGGSGGGGSGGGGSEIVLTQSPATLSLSPGERATLSCRASQSVSSYLAWYQQKPGQAPRLLIYDASNRATGIPARFSGSGSGTDFTLTISSLEPEDFAVYYCQQRRNWPLTFGGGTKVEIK

SEQ ID NO: 555 - protein, 706 aa, Artificial Sequence
  Description of Artificial Sequence: Synthetic polypeptide
QVQLVESGGGVVQPGRSLRLSCAASGFTFSNYGMYWVRQAPGKGLEWVAVIWYDGSNKYYADSVKGRFTISRDNSKNTLYLQMNSLRAEDTAVYYCARDLWGWYFDYWGQGTLVTVSSASTKGPSVFPLAPSSKSTSGGTAALGCLVKDYFPEPVTVSWNSGALTSGVHTFPAVLQSSGLYSLSSVVTVPSSSLGTQTYICNVNHKPSNTKVDKKVEPKSCDKTHTCPPCPAPELLGGPSVFLFPPKPKDTLMISRTPEVTCVVVDVSHEDPEVKFNWYVDGVEVHNAKTKPREEQYNSTYRVVSVLTVLHQDWLNGKEYKCKVSNKALPAPIEKTISKAKGQPREPQVYTLPPSREEMTKNQVSLTCLVKGFYPSDIAVEWESNGQPENNYKTTPPVLDSDGSFFLYSKLTVDKSRWQQGNVFSCSVMHEALHNHYTQKSLSLSPGGGGGSGGGGSEVQLVESGGGVVQPGRSLRLSCSASGFTFSGYGLSWVRQAPGKGLEWVAMISSGGSYTYYADSVKGRFAISRDNAKNTLFLQMDSLRPEDTGVYFCARHGDDPAWFAYWGQGTPVTVSSGGGGSGGGGSGGGGSGGGGSDIQLTQSPSSLSASVGDRVTITCSVSSSISSNNLHWYQQKPGKAPKPWIYGTSNLASGVPSRFSGSGSGTDYTFTISSLQPEDIATYYCQQWSSYPYMYTFGQGTKVEIK

SEQ ID NO: 556 - protein, 703 aa, Artificial Sequence
  Description of Artificial Sequence: Synthetic polypeptide
EVQLVESGGGVVQPGRSLRLSCSASGFTFSGYGLSWVRQAPGKGLEWVAMISSGGSYTYYADSVKGRFAISRDNAKNTLFLQMDSLRPEDTGVYFCARHGDDPAWFAYWGQGTPVTVSSASTKGPSVFPLAPSSKSTSGGTAALGCLVKDYFPEPVTVSWNSGALTSGVHTFPAVLQSSGLYSLSSVVTVPSSSLGTQTYICNVNHKPSNTKVDKKVEPKSCDKTHTCPPCPAPELLGGPSVFLFPPKPKDTLMISRTPEVTCVVVDVSHEDPEVKFNWYVDGVEVHNAKTKPREEQYNSTYRVVSVLTVLHQDWLNGKEYKCKVSNKALPAPIEKTISKAKGQPREPQVYTLPPSREEMTKNQVSLTCLVKGFYPSDIAVEWESNGQPENNYKTTPPVLDSDGSFFLYSKLTVDKSRWQQGNVFSCSVMHEALHNHYTQKSLSLSPGGGGGSGGGGSQVQLVESGGGVVQPGRSLRLSCAASGFTFSNYGMYWVRQAPGKGLEWVAVIWYDGSNKYYADSVKGRFTISRDNSKNTLYLQMNSLRAEDTAVYYCARDLWGWYFDYWGQGTLVTVSSGGGGSGGGGSGGGGSGGGGSEIVLTQSPATLSLSPGERATLSCRASQSVSSYLAWYQQKPGQAPRLLIYDASNRATGIPARFSGSGSGTDFTLTISSLEPEDFAVYYCQQRRNWPLTFGGGTKVEIK

SEQ ID NO: 557 - protein, 706 aa, Artificial Sequence
  Description of Artificial Sequence: Synthetic polypeptide
QVQLVESGGGVVQPGRSLRLSCAASGFTFSNYGMYWVRQAPGKGLEWVAVIWYDGSNKYYADSVKGRFTISRDNSKNTLYLQMNSLRAEDTAVYYCARDLWGWYFDYWGQGTLVTVSSASTKGPSVFPLAPSSKSTSGGTAALGCLVKDYFPEPVTVSWNSGALTSGVHTFPAVLQSSGLYSLSSVVTVPSSSLGTQTYICNVNHKPSNTKVDKKVEPKSCDKTHTCPPCPAPELLGGPSVFLFPPKPKDTLMISRTPEVTCVVVDVSHEDPEVKFNWYVDGVEVHNAKTKPREEQYNSTYRVVSVLTVLHQDWLNGKEYKCKVSNKALPAPIEKTISKAKGQPREPQVYTLPPSREEMTKNQVSLTCLVKGFYPSDIAVEWESNGQPENNYKTTPPVLDSDGSFFLYSKLTVDKSRWQQGNVFSCSVMHEALHNHYTQKSLSLSPGGGGGSGGGGSQVQLVQSGAEVVKPGASVKISCKASGYTFTGYFMNWVKQSPGQSLEWIGRIHPYDGDTFYNQKFQGKATLTVDKSSNTAHMELLSLTSEDFAVYYCTRYDGSRAMDYWGQGTTVTVSSGGGGSGGGGSGGGGSGGGGSDIVLTQSPLSLAVSLGQPAIISCKASQSVSFAGTSLMHWYHQKPGQQPRLLIYRASNLEAGVPDRFSGSGSKTDFTLTISPVEAEDAATYYCQQSREYPYTFGGGTKLEIK

SEQ ID NO: 558 - protein, 702 aa, Artificial Sequence
  Description of Artificial Sequence: Synthetic polypeptide
QVQLVQSGAEVVKPGASVKISCKASGYTFTGYFMNWVKQSPGQSLEWIGRIHPYDGDTFYNQKFQGKATLTVDKSSNTAHMELLSLTSEDFAVYYCTRYDGSRAMDYWGQGTTVTVSSASTKGPSVFPLAPSSKSTSGGTAALGCLVKDYFPEPVTVSWNSGALTSGVHTFPAVLQSSGLYSLSSVVTVPSSSLGTQTYICNVNHKPSNTKVDKKVEPKSCDKTHTCPPCPAPELLGGPSVFLFPPKPKDTLMISRTPEVTCVVVDVSHEDPEVKFNWYVDGVEVHNAKTKPREEQYNSTYRVVSVLTVLHQDWLNGKEYKCKVSNKALPAPIEKTISKAKGQPREPQVYTLPPSREEMTKNQVSLTCLVKGFYPSDIAVEWESNGQPENNYKTTPPVLDSDGSFFLYSKLTVDKSRWQQGNVFSCSVMHEALHNHYTQKSLSLSPGGGGGSGGGGSQVQLVESGGGVVQPGRSLRLSCAASGFTFSNYGMYWVRQAPGKGLEWVAVIWYDGSNKYYADSVKGRFTISRDNSKNTLYLQMNSLRAEDTAVYYCARDLWGWYFDYWGQGTLVTVSSGGGGSGGGGSGGGGSGGGGSEIVLTQSPATLSLSPGERATLSCRASQSVSSYLAWYQQKPGQAPRLLIYDASNRATGIPARFSGSGSGTDFTLTISSLEPEDFAVYYCQQRRNWPLTFGGGTKVEIK

SEQ ID NO: 559 - protein, 699 aa, Artificial Sequence
  Description of Artificial Sequence: Synthetic polypeptide
QVQLVESGGGVVQPGRSLRLSCAASGFTFSNYGMYWVRQAPGKGLEWVAVIWYDGSNKYYADSVKGRFTISRDNSKNTLYLQMNSLRAEDTAVYYCARDLWGWYFDYWGQGTLVTVSSASTKGPSVFPLAPSSKSTSGGTAALGCLVKDYFPEPVTVSWNSGALTSGVHTFPAVLQSSGLYSLSSVVTVPSSSLGTQTYICNVNHKPSNTKVDKKVEPKSCDKTHTCPPCPAPELLGGPSVFLFPPKPKDTLMISRTPEVTCVVVDVSHEDPEVKFNWYVDGVEVHNAKTKPREEQYNSTYRVVSVLTVLHQDWLNGKEYKCKVSNKALPAPIEKTISKAKGQPREPQVYTLPPSREEMTKNQVSLTCLVKGFYPSDIAVEWESNGQPENNYKTTPPVLDSDGSFFLYSKLTVDKSRWQQGNVFSCSVMHEALHNHYTQKSLSLSPGGGGGSGGGGSEVQLQQSGPELKKPGTSVRISCKTSGYTFTEYTIHWVKQSHGKSLEWIGNINPNNGGTTYNQKFEDKATLTVDKSSSTAYMELRSLTSEDSAVYYCAAGWNFDYWGQGTTLTVSSGGGGSGGGGSGGGGSGGGGSDIVMTQSHKFMSTSVGDRVSIICKASQDVGTAVDWYQQKPGQSPKLLIYWASTRHTGVPDRFTGSGSGTDFTLTITNVQSEDLADYFCQQYNSYPLTFGAGTMLDLK

SEQ ID NO: 560 - protein, 699 aa, Artificial Sequence
  Description of Artificial Sequence: Synthetic polypeptide
EVQLQQSGPELKKPGTSVRISCKTSGYTFTEYTIHWVKQSHGKSLEWIGNINPNNGGTTYNQKFEDKATLTVDKSSSTAYMELRSLTSEDSAVYYCAAGWNFDYWGQGTTLTVSSASTKGPSVFPLAPSSKSTSGGTAALGCLVKDYFPEPVTVSWNSGALTSGVHTFPAVLQSSGLYSLSSVVTVPSSSLGTQTYICNVNHKPSNTKVDKKVEPKSCDKTHTCPPCPAPELLGGPSVFLFPPKPKDTLMISRTPEVTCVVVDVSHEDPEVKFNWYVDGVEVHNAKTKPREEQYNSTYRVVSVLTVLHQDWLNGKEYKCKVSNKALPAPIEKTISKAKGQPREPQVYTLPPSREEMTKNQVSLTCLVKGFYPSDIAVEWESNGQPENNYKTTPPVLDSDGSFFLYSKLTVDKSRWQQGNVFSCSVMHEALHNHYTQKSLSLSPGGGGGSGGGGSQVQLVESGGGVVQPGRSLRLSCAASGFTFSNYGMYWVRQAPGKGLEWVAVIWYDGSNKYYADSVKGRFTISRDNSKNTLYLQMNSLRAEDTAVYYCARDLWGWYFDYWGQGTLVTVSSGGGGSGGGGSGGGGSGGGGSEIVLTQSPATLSLSPGERATLSCRASQSVSSYLAWYQQKPGQAPRLLIYDASNRATGIPARFSGSGSGTDFTLTISSLEPEDFAVYYCQQRRNWPLTFGGGTKVEIK

SEQ ID NO: 561 - protein, 699 aa, Artificial Sequence
  Description of Artificial Sequence: Synthetic polypeptide
QVQLVESGGGVVQPGRSLRLSCAASGFTFSNYGMYWVRQAPGKGLEWVAVIWYDGSNKYYADSVKGRFTISRDNSKNTLYLQMNSLRAEDTAVYYCARDLWGWYFDYWGQGTLVTVSSASTKGPSVFPLAPSSKSTSGGTAALGCLVKDYFPEPVTVSWNSGALTSGVHTFPAVLQSSGLYSLSSVVTVPSSSLGTQTYICNVNHKPSNTKVDKKVEPKSCDKTHTCPPCPAPELLGGPSVFLFPPKPKDTLMISRTPEVTCVVVDVSHEDPEVKFNWYVDGVEVHNAKTKPREEQYNSTYRVVSVLTVLHQDWLNGKEYKCKVSNKALPAPIEKTISKAKGQPREPQVYTLPPSREEMTKNQVSLTCLVKGFYPSDIAVEWESNGQPENNYKTTPPVLDSDGSFFLYSKLTVDKSRWQQGNVFSCSVMHEALHNHYTQKSLSLSPGGGGGSGGGGSEVQLQQSGPELVKPGTSVRISCKTSGYTFTEYTIHWVKQSHGKSLEWIGNINPNNGGTTYNQKFEDKATLTVDKSSSTAYMELRSLTSEDSAVYYCAAGWNFDYWGQGTTLTVSSGGGGSGGGGSGGGGSGGGGSNIVMTQSPKSMSMSVGERVTLTCKASENVVTYVSWYQQKPEQSPKLLIYGASNRYTGVPDRFTGSGSATDFTLTISSVQAEDLADYHCGQGYSYPYTFGGGTKLEIK

SEQ ID NO: 562 - protein, 699 aa, Artificial Sequence
  Description of Artificial Sequence: Synthetic polypeptide
EVQLQQSGPELVKPGTSVRISCKTSGYTFTEYTIHWVKQSHGKSLEWIGNINPNNGGTTYNQKFEDKATLTVDKSSSTAYMELRSLTSEDSAVYYCAAGWNFDYWGQGTTLTVSSASTKGPSVFPLAPSSKSTSGGTAALGCLVKDYFPEPVTVSWNSGALTSGVHTFPAVLQSSGLYSLSSVVTVPSSSLGTQTYICNVNHKPSNTKVDKKVEPKSCDKTHTCPPCPAPELLGGPSVFLFPPKPKDTLMISRTPEVTCVVVDVSHEDPEVKFNWYVDGVEVHNAKTKPREEQYNSTYRVVSVLTVLHQDWLNGKEYKCKVSNKALPAPIEKTISKAKGQPREPQVYTLPPSREEMTKNQVSLTCLVKGFYPSDIAVEWESNGQPENNYKTTPPVLDSDGSFFLYSKLTVDKSRWQQGNVFSCSVMHEALHNHYTQKSLSLSPGGGGGSGGGGSQVQLVESGGGVVQPGRSLRLSCAASGFTFSNYGMYWVRQAPGKGLEWVAVIWYDGSNKYYADSVKGRFTISRDNSKNTLYLQMNSLRAEDTAVYYCARDLWGWYFDYWGQGTLVTVSSGGGGSGGGGSGGGGSGGGGSEIVLTQSPATLSLSPGERATLSCRASQSVSSYLAWYQQKPGQAPRLLIYDASNRATGIPARFSGSGSGTDFTLTISSLEPEDFAVYYCQQRRNWPLTFGGGTKVEIK

SEQ ID NO: 563 - protein, 702 aa, Artificial Sequence
  Description of Artificial Sequence: Synthetic polypeptide
QVQLVESGGGVVQPGRSLRLSCAASGFTFSNYGMYWVRQAPGKGLEWVAVIWYDGSNKYYADSVKGRFTISRDNSKNTLYLQMNSLRAEDTAVYYCARDLWGWYFDYWGQGTLVTVSSASTKGPSVFPLAPSSKSTSGGTAALGCLVKDYFPEPVTVSWNSGALTSGVHTFPAVLQSSGLYSLSSVVTVPSSSLGTQTYICNVNHKPSNTKVDKKVEPKSCDKTHTCPPCPAPELLGGPSVFLFPPKPKDTLMISRTPEVTCVVVDVSHEDPEVKFNWYVDGVEVHNAKTKPREEQYNSTYRVVSVLTVLHQDWLNGKEYKCKVSNKALPAPIEKTISKAKGQPREPQVYTLPPSREEMTKNQVSLTCLVKGFYPSDIAVEWESNGQPENNYKTTPPVLDSDGSFFLYSKLTVDKSRWQQGNVFSCSVMHEALHNHYTQKSLSLSPGGGGGSGGGGSQVQLVQSGAEVKKPGASVKVSCKASGYTFTNYGMNWVRQAPGQGLEWMGWINTYTGEPTYADDFKGRVTMTTDTSTSTAYMELRSLRSDDTAVYYCARIGDSSPSDYWGQGTLVTVSSGGGGSGGGGSGGGGSGGGGSEIVMTQSPATLSVSPGERATLSCKASQSVSNDVVWYQQKPGQAPRLLIYYASNRYTGIPARFSGSGSGTEFTLTISSLQSEDFAVYYCQQDYTSPWTFGQGTKLEIK

SEQ ID NO: 564 - protein, 702 aa, Artificial Sequence
  Description of Artificial Sequence: Synthetic polypeptide
QVQLVQSGAEVKKPGASVKVSCKASGYTFTNYGMNWVRQAPGQGLEWMGWINTYTGEPTYADDFKGRVTMTTDTSTSTAYMELRSLRSDDTAVYYCARIGDSSPSDYWGQGTLVTVSSASTKGPSVFPLAPSSKSTSGGTAALGCLVKDYFPEPVTVSWNSGALTSGVHTFPAVLQSSGLYSLSSVVTVPSSSLGTQTYICNVNHKPSNTKVDKKVEPKSCDKTHTCPPCPAPELLGGPSVFLFPPKPKDTLMISRTPEVTCVVVDVSHEDPEVKFNWYVDGVEVHNAKTKPREEQYNSTYRVVSVLTVLHQDWLNGKEYKCKVSNKALPAPIEKTISKAKGQPREPQVYTLPPSREEMTKNQVSLTCLVKGFYPSDIAVEWESNGQPENNYKTTPPVLDSDGSFFLYSKLTVDKSRWQQGNVFSCSVMHEALHNHYTQKSLSLSPGGGGGSGGGGSQVQLVESGGGVVQPGRSLRLSCAASGFTFSNYGMYWVRQAPGKGLEWVAVIWYDGSNKYYADSVKGRFTISRDNSKNTLYLQMNSLRAEDTAVYYCARDLWGWYFDYWGQGTLVTVSSGGGGSGGGGSGGGGSGGGGSEIVLTQSPATLSLSPGERATLSCRASQSVSSYLAWYQQKPGQAPRLLIYDASNRATGIPARFSGSGSGTDFTLTISSLEPEDFAVYYCQQRRNWPLTFGGGTKVEIK

SEQ ID NO: 565 - protein, 707 aa, Artificial Sequence
  Description of Artificial Sequence: Synthetic polypeptide
QVQLVESGGGVVQPGRSLRLSCAASGFTFSNYGMYWVRQAPGKGLEWVAVIWYDGSNKYYADSVKGRFTISRDNSKNTLYLQMNSLRAEDTAVYYCARDLWGWYFDYWGQGTLVTVSSASTKGPSVFPLAPSSKSTSGGTAALGCLVKDYFPEPVTVSWNSGALTSGVHTFPAVLQSSGLYSLSSVVTVPSSSLGTQTYICNVNHKPSNTKVDKKVEPKSCDKTHTCPPCPAPELLGGPSVFLFPPKPKDTLMISRTPEVTCVVVDVSHEDPEVKFNWYVDGVEVHNAKTKPREEQYNSTYRVVSVLTVLHQDWLNGKEYKCKVSNKALPAPIEKTISKAKGQPREPQVYTLPPSREEMTKNQVSLTCLVKGFYPSDIAVEWESNGQPENNYKTTPPVLDSDGSFFLYSKLTVDKSRWQQGNVFSCSVMHEALHNHYTQKSLSLSPGGGGGSGGGGSQVQLVQSGPEVKKPGASVKVSCKASGYTFTDYAVHWVRQAPGKRLEWIGVISTYNDYTYNNQDFKGRVTMTRDTSASTAYMELSRLRSEDTAVYYCARGNSYFYALDYWGQGTSVTVSSGGGGSGGGGSGGGGSGGGGSEIVLTQSPATLSLSPGERATLSCRASESVDSYGKSFMHWYQQKPGQAPRLLIYRASNLESGIPARFSGSGSGTDFTLTISSLEPEDFAVYYCQQSNEDPWTFGGGTKLEIK

SEQ ID NO: 566 - protein, 703 aa, Artificial Sequence
  Description of Artificial Sequence: Synthetic polypeptide
QVQLVQSGPEVKKPGASVKVSCKASGYTFTDYAVHWVRQAPGKRLEWIGVISTYNDYTYNNQDFKGRVTMTRDTSASTAYMELSRLRSEDTAVYYCARGNSYFYALDYWGQGTSVTVSSASTKGPSVFPLAPSSKSTSGGTAALGCLVKDYFPEPVTVSWNSGALTSGVHTFPAVLQSSGLYSLSSVVTVPSSSLGTQTYICNVNHKPSNTKVDKKVEPKSCDKTHTCPPCPAPELLGGPSVFLFPPKPKDTLMISRTPEVTCVVVDVSHEDPEVKFNWYVDGVEVHNAKTKPREEQYNSTYRVVSVLTVLHQDWLNGKEYKCKVSNKALPAPIEKTISKAKGQPREPQVYTLPPSREEMTKNQVSLTCLVKGFYPSDIAVEWESNGQPENNYKTTPPVLDSDGSFFLYSKLTVDKSRWQQGNVFSCSVMHEALHNHYTQKSLSLSPGGGGGSGGGGSQVQLVESGGGVVQPGRSLRLSCAASGFTFSNYGMYWVRQAPGKGLEWVAVIWYDGSNKYYADSVKGRFTISRDNSKNTLYLQMNSLRAEDTAVYYCARDLWGWYFDYWGQGTLVTVSSGGGGSGGGGSGGGGSGGGGSEIVLTQSPATLSLSPGERATLSCRASQSVSSYLAWYQQKPGQAPRLLIYDASNRATGIPARFSGSGSGTDFTLTISSLEPEDFAVYYCQQRRNWPLTFGGGTKVEIK

SEQ ID NO: 567 - protein, 699 aa, Artificial Sequence
  Description of Artificial Sequence: Synthetic polypeptide
QVQLVESGGGVVQPGRSLRLSCAASGFTFSNYGMYWVRQAPGKGLEWVAVIWYDGSNKYYADSVKGRFTISRDNSKNTLYLQMNSLRAEDTAVYYCARDLWGWYFDYWGQGTLVTVSSASTKGPSVFPLAPSSKSTSGGTAALGCLVKDYFPEPVTVSWNSGALTSGVHTFPAVLQSSGLYSLSSVVTVPSSSLGTQTYICNVNHKPSNTKVDKKVEPKSCDKTHTCPPCPAPELLGGPSVFLFPPKPKDTLMISRTPEVTCVVVDVSHEDPEVKFNWYVDGVEVHNAKTKPREEQYNSTYRVVSVLTVLHQDWLNGKEYKCKVSNKALPAPIEKTISKAKGQPREPQVYTLPPSREEMTKNQVSLTCLVKGFYPSDIAVEWESNGQPENNYKTTPPVLDSDGSFFLYSKLTVDKSRWQQGNVFSCSVMHEALHNHYTQKSLSLSPGGGGGSGGGGSQVQLVESGGGVVQPGRSLRLSCAASGFTFSSYAFHWVRQAPGKGLEWVAVISYDGSIKYYADSVKGRFTISRDNSKNTLYLQMNSLRAEDTAVYYCARTYYFDYWGQGTLVTVSSGGGGSGGGGSGGGGSGGGGSEIVLTQSPDFQSVTPKEKVTITCRASQSIGSSLHWYQQKPDQSPKLLIKYASQSFSGVPSRFSGSGSGTDFTLTINSLEAEDAAAYYCHQSSSLPITFGQGTRLEIK

SEQ ID NO: 568 - protein, 699 aa, Artificial Sequence
  Description of Artificial Sequence: Synthetic polypeptide
QVQLVESGGGVVQPGRSLRLSCAASGFTFSSYAFHWVRQAPGKGLEWVAVISYDGSIKYYADSVKGRFTISRDNSKNTLYLQMNSLRAEDTAVYYCARTYYFDYWGQGTLVTVSSASTKGPSVFPLAPSSKSTSGGTAALGCLVKDYFPEPVTVSWNSGALTSGVHTFPAVLQSSGLYSLSSVVTVPSSSLGTQTYICNVNHKPSNTKVDKKVEPKSCDKTHTCPPCPAPELLGGPSVFLFPPKPKDTLMISRTPEVTCVVVDVSHEDPEVKFNWYVDGVEVHNAKTKPREEQYNSTYRVVSVLTVLHQDWLNGKEYKCKVSNKALPAPIEKTISKAKGQPREPQVYTLPPSREEMTKNQVSLTCLVKGFYPSDIAVEWESNGQPENNYKTTPPVLDSDGSFFLYSKLTVDKSRWQQGNVFSCSVMHEALHNHYTQKSLSLSPGGGGGSGGGGSQVQLVESGGGVVQPGRSLRLSCAASGFTFSNYGMYWVRQAPGKGLEWVAVIWYDGSNKYYADSVKGRFTISRDNSKNTLYLQMNSLRAEDTAVYYCARDLWGWYFDYWGQGTLVTVSSGGGGSGGGGSGGGGSGGGGSEIVLTQSPATLSLSPGERATLSCRASQSVSSYLAWYQQKPGQAPRLLIYDASNRATGIPARFSGSGSGTDFTLTISSLEPEDFAVYYCQQRRNWPLTFGGGTKVEIK

SEQ ID NO: 569 - protein, 709 aa, Artificial Sequence
  Description of Artificial Sequence: Synthetic polypeptide
QVQLVESGGGVVQPGRSLRLSCAASGFTFSNYGMYWVRQAPGKGLEWVAVIWYDGSNKYYADSVKGRFTISRDNSKNTLYLQMNSLRAEDTAVYYCARDLWGWYFDYWGQGTLVTVSSASTKGPSVFPLAPSSKSTSGGTAALGCLVKDYFPEPVTVSWNSGALTSGVHTFPAVLQSSGLYSLSSVVTVPSSSLGTQTYICNVNHKPSNTKVDKKVEPKSCDKTHTCPPCPAPELLGGPSVFLFPPKPKDTLMISRTPEVTCVVVDVSHEDPEVKFNWYVDGVEVHNAKTKPREEQYNSTYRVVSVLTVLHQDWLNGKEYKCKVSNKALPAPIEKTISKAKGQPREPQVYTLPPSREEMTKNQVSLTCLVKGFYPSDIAVEWESNGQPENNYKTTPPVLDSDGSFFLYSKLTVDKSRWQQGNVFSCSVMHEALHNHYTQKSLSLSPGGGGGSGGGGSQVQLVQSGAEVKKPGASVKVSCKASGLTIEDYYMHWVRQAPGQGLEWMGWIDPENGDTEYGPKFQGRVTMTRDTSINTAYMELSRLRSDDTAVYYCAVHNAHYGTWFAYWGQGTLVTVSSGGGGSGGGGSGGGGSGGGGSDVVMTQSPLSLPVTLGQPASISCRSSQSLLHSSGNTYLEYFQQRPGQSPRPLIYKISTRFSGVPDRFSGSGSGTDFTLKISRVEAEDVGVYYCFQGSHVPYTFGGGTKVEIK

SEQ ID NO: 570 - protein, 704 aa, Artificial Sequence
  Description of Artificial Sequence: Synthetic polypeptide
QVQLVQSGAEVKKPGASVKVSCKASGLTIEDYYMHWVRQAPGQGLEWMGWIDPENGDTEYGPKFQGRVTMTRDTSINTAYMELSRLRSDDTAVYYCAVHNAHYGTWFAYWGQGTLVTVSSASTKGPSVFPLAPSSKSTSGGTAALGCLVKDYFPEPVTVSWNSGALTSGVHTFPAVLQSSGLYSLSSVVTVPSSSLGTQTYICNVNHKPSNTKVDKKVEPKSCDKTHTCPPCPAPELLGGPSVFLFPPKPKDTLMISRTPEVTCVVVDVSHEDPEVKFNWYVDGVEVHNAKTKPREEQYNSTYRVVSVLTVLHQDWLNGKEYKCKVSNKALPAPIEKTISKAKGQPREPQVYTLPPSREEMTKNQVSLTCLVKGFYPSDIAVEWESNGQPENNYKTTPPVLDSDGSFFLYSKLTVDKSRWQQGNVFSCSVMHEALHNHYTQKSLSLSPGGGGGSGGGGSQVQLVESGGGVVQPGRSLRLSCAASGFTFSNYGMYWVRQAPGKGLEWVAVIWYDGSNKYYADSVKGRFTISRDNSKNTLYLQMNSLRAEDTAVYYCARDLWGWYFDYWGQGTLVTVSSGGGGSGGGGSGGGGSGGGGSEIVLTQSPATLSLSPGERATLSCRASQSVSSYLAWYQQKPGQAPRLLIYDASNRATGIPARFSGSGSGTDFTLTISSLEPEDFAVYYCQQRRNWPLTFGGGTKVEIK

SEQ ID NO: 571 - protein, 700 aa, Artificial Sequence
  Description of Artificial Sequence: Synthetic polypeptide
QVQLVESGGGVVQPGRSLRLSCAASGFTFSNYGMYWVRQAPGKGLEWVAVIWYDGSNKYYADSVKGRFTISRDNSKNTLYLQMNSLRAEDTAVYYCARDLWGWYFDYWGQGTLVTVSSASTKGPSVFPLAPSSKSTSGGTAALGCLVKDYFPEPVTVSWNSGALTSGVHTFPAVLQSSGLYSLSSVVTVPSSSLGTQTYICNVNHKPSNTKVDKKVEPKSCDKTHTCPPCPAPELLGGPSVFLFPPKPKDTLMISRTPEVTCVVVDVSHEDPEVKFNWYVDGVEVHNAKTKPREEQYNSTYRVVSVLTVLHQDWLNGKEYKCKVSNKALPAPIEKTISKAKGQPREPQVYTLPPSREEMTKNQVSLTCLVKGFYPSDIAVEWESNGQPENNYKTTPPVLDSDGSFFLYSKLTVDKSRWQQGNVFSCSVMHEALHNHYTQKSLSLSPGGGGGSGGGGSQVQLQESGPGLVKPSQTLSLTCTVSGYAFTAYNIHWVRQAPGQGLEWMGSFDPYDGGSSYNQKFKDRLTISKDTSKNQVVLTMTNMDPVDTATYYCARGWYYFDYWGHGTLVTVSSGGGGSGGGGSGGGGSGGGGSDIVMTQTPLSLPVTPGEPASISCRASKSISKYLAWYQQKPGQAPRLLIYSGSTLQSGIPPRFSGSGYGTDFTLTINNIESEDAAYYFCQQHDESPYTFGEGTKVEIK

SEQ ID NO: 572 - protein, 700 aa, Artificial Sequence
  Description of Artificial Sequence: Synthetic polypeptide
QVQLQESGPGLVKPSQTLSLTCTVSGYAFTAYNIHWVRQAPGQGLEWMGSFDPYDGGSSYNQKFKDRLTISKDTSKNQVVLTMTNMDPVDTATYYCARGWYYFDYWGHGTLVTVSSASTKGPSVFPLAPSSKSTSGGTAALGCLVKDYFPEPVTVSWNSGALTSGVHTFPAVLQSSGLYSLSSVVTVPSSSLGTQTYICNVNHKPSNTKVDKKVEPKSCDKTHTCPPCPAPELLGGPSVFLFPPKPKDTLMISRTPEVTCVVVDVSHEDPEVKFNWYVDGVEVHNAKTKPREEQYNSTYRVVSVLTVLHQDWLNGKEYKCKVSNKALPAPIEKTISKAKGQPREPQVYTLPPSREEMTKNQVSLTCLVKGFYPSDIAVEWESNGQPENNYKTTPPVLDSDGSFFLYSKLTVDKSRWQQGNVFSCSVMHEALHNHYTQKSLSLSPGGGGGSGGGGSQVQLVESGGGVVQPGRSLRLSCAASGFTFSNYGMYWVRQAPGKGLEWVAVIWYDGSNKYYADSVKGRFTISRDNSKNTLYLQMNSLRAEDTAVYYCARDLWGWYFDYWGQGTLVTVSSGGGGSGGGGSGGGGSGGGGSEIVLTQSPATLSLSPGERATLSCRASQSVSSYLAWYQQKPGQAPRLLIYDASNRATGIPARFSGSGSGTDFTLTISSLEPEDFAVYYCQQRRNWPLTFGGGTKVEIK

SEQ ID NO: 573 - protein, 704 aa, Artificial Sequence
  Description of Artificial Sequence: Synthetic polypeptide
QVQLVESGGGVVQPGRSLRLSCAASGFTFSNYGMYWVRQAPGKGLEWVAVIWYDGSNKYYADSVKGRFTISRDNSKNTLYLQMNSLRAEDTAVYYCARDLWGWYFDYWGQGTLVTVSSASTKGPSVFPLAPSSKSTSGGTAALGCLVKDYFPEPVTVSWNSGALTSGVHTFPAVLQSSGLYSLSSVVTVPSSSLGTQTYICNVNHKPSNTKVDKKVEPKSCDKTHTCPPCPAPELLGGPSVFLFPPKPKDTLMISRTPEVTCVVVDVSHEDPEVKFNWYVDGVEVHNAKTKPREEQYNSTYRVVSVLTVLHQDWLNGKEYKCKVSNKALPAPIEKTISKAKGQPREPQVYTLPPSREEMTKNQVSLTCLVKGFYPSDIAVEWESNGQPENNYKTTPPVLDSDGSFFLYSKLTVDKSRWQQGNVFSCSVMHEALHNHYTQKSLSLSPGGGGGSGGGGSQVQLVESGGGVVQPGRSLRLSCTASGFRFRSHGMHWVRQAPGKGLEWVAVISYDGNNKLYADSVKGRITISRDNSKNTLFLQMNNVRAEDTAVYYCASPYTSDWQYFQYWGQGTLVIVSSGGGGSGGGGSGGGGSGGGGSEIVMTQSPATLSVSPGERATFSCRASQNISTTLAWYQQKPGQAPRLLIYDTSTRATGIPARFSGSGSGTEFTLTISSLQSEDLAVYYCQQSNSWPLTFGGGTKVEIK

SEQ ID NO: 574 - protein, 704 aa, Artificial Sequence
  Description of Artificial Sequence: Synthetic polypeptide
QVQLVESGGGVVQPGRSLRLSCTASGFRFRSHGMHWVRQAPGKGLEWVAVISYDGNNKLYADSVKGRITISRDNSKNTLFLQMNNVRAEDTAVYYCASPYTSDWQYFQYWGQGTLVIVSSASTKGPSVFPLAPSSKSTSGGTAALGCLVKDYFPEPVTVSWNSGALTSGVHTFPAVLQSSGLYSLSSVVTVPSSSLGTQTYICNVNHKPSNTKVDKKVEPKSCDKTHTCPPCPAPELLGGPSVFLFPPKPKDTLMISRTPEVTCVVVDVSHEDPEVKFNWYVDGVEVHNAKTKPREEQYNSTYRVVSVLTVLHQDWLNGKEYKCKVSNKALPAPIEKTISKAKGQPREPQVYTLPPSREEMTKNQVSLTCLVKGFYPSDIAVEWESNGQPENNYKTTPPVLDSDGSFFLYSKLTVDKSRWQQGNVFSCSVMHEALHNHYTQKSLSLSPGGGGGSGGGGSQVQLVESGGGVVQPGRSLRLSCAASGFTFSNYGMYWVRQAPGKGLEWVAVIWYDGSNKYYADSVKGRFTISRDNSKNTLYLQMNSLRAEDTAVYYCARDLWGWYFDYWGQGTLVTVSSGGGGSGGGGSGGGGSGGGGSEIVLTQSPATLSLSPGERATLSCRASQSVSSYLAWYQQKPGQAPRLLIYDASNRATGIPARFSGSGSGTDFTLTISSLEPEDFAVYYCQQRRNWPLTFGGGTKVEIK

SEQ ID NO: 575 - protein, 707 aa, Artificial Sequence
  Description of Artificial Sequence: Synthetic polypeptide
QVQLVESGGGVVQPGRSLRLSCAASGFTFSNYGMYWVRQAPGKGLEWVAVIWYDGSNKYYADSVKGRFTISRDNSKNTLYLQMNSLRAEDTAVYYCARDLWGWYFDYWGQGTLVTVSSASTKGPSVFPLAPSSKSTSGGTAALGCLVKDYFPEPVTVSWNSGALTSGVHTFPAVLQSSGLYSLSSVVTVPSSSLGTQTYICNVNHKPSNTKVDKKVEPKSCDKTHTCPPCPAPELLGGPSVFLFPPKPKDTLMISRTPEVTCVVVDVSHEDPEVKFNWYVDGVEVHNAKTKPREEQYNSTYRVVSVLTVLHQDWLNGKEYKCKVSNKALPAPIEKTISKAKGQPREPQVYTLPPSREEMTKNQVSLTCLVKGFYPSDIAVEWESNGQPENNYKTTPPVLDSDGSFFLYSKLTVDKSRWQQGNVFSCSVMHEALHNHYTQKSLSLSPGGGGGSGGGGSQVQLVQSGGGVVRPGGSLRLSCAASGFSFIDYGMSWVRQVPGKGLEWVAGMNWSGDKKGHAESVKGRFIISRDNAKNTLYLEMSSLRVEDTALYFCARGEYSNRFDPRGRGTLVTVSSGGGGSGGGGSGGGGSGGGGSDIVMTQTPLSLPVTLGQPASLSCRSSQSLVFTDGNTYLNWFQQRPGQSPRRLIYKVSSRDPGVPDRFSGTGSGTDFTLEISRVEAEDIGVYYCMQGTHWPPIFGQGTKVEIK

SEQ ID NO: 576 - protein, 702 aa, Artificial Sequence
  Description of Artificial Sequence: Synthetic polypeptide
QVQLVQSGGGVVRPGGSLRLSCAASGFSFIDYGMSWVRQVPGKGLEWVAGMNWSGDKKGHAESVKGRFIISRDNAKNTLYLEMSSLRVEDTALYFCARGEYSNRFDPRGRGTLVTVSSASTKGPSVFPLAPSSKSTSGGTAALGCLVKDYFPEPVTVSWNSGALTSGVHTFPAVLQSSGLYSLSSVVTVPSSSLGTQTYICNVNHKPSNTKVDKKVEPKSCDKTHTCPPCPAPELLGGPSVFLFPPKPKDTLMISRTPEVTCVVVDVSHEDPEVKFNWYVDGVEVHNAKTKPREEQYNSTYRVVSVLTVLHQDWLNGKEYKCKVSNKALPAPIEKTISKAKGQPREPQVYTLPPSREEMTKNQVSLTCLVKGFYPSDIAVEWESNGQPENNYKTTPPVLDSDGSFFLYSKLTVDKSRWQQGNVFSCSVMHEALHNHYTQKSLSLSPGGGGGSGGGGSQVQLVESGGGVVQPGRSLRLSCAASGFTFSNYGMYWVRQAPGKGLEWVAVIWYDGSNKYYADSVKGRFTISRDNSKNTLYLQMNSLRAEDTAVYYCARDLWGWYFDYWGQGTLVTVSSGGGGSGGGGSGGGGSGGGGSEIVLTQSPATLSLSPGERATLSCRASQSVSSYLAWYQQKPGQAPRLLIYDASNRATGIPARFSGSGSGTDFTLTISSLEPEDFAVYYCQQRRNWPLTFGGGTKVEIK

SEQ ID NO: 577 - protein, 456 aa, Artificial Sequence
  Description of Artificial Sequence: Synthetic polypeptide
QVQLVQSGAEVKKPGASVKVSCKASGYTFTGYYMHWVRQAPGQGLEWMGWINPDSGGTNYAQKFQGRVTMTRDTSISTAYMELNRLRSDDTAVYYCARDQPLGYCTNGVCSYFDYWGQGTLVTVSSASTKGPSVFPLAPCSRSTSESTAALGCLVKDYFPEPVTVSWNSGALTSGVHTFPAVLQSSGLYSLSSVVTVPSSNFGTQTYTCNVDHKPSNTKVDKTVEPKSCDKTHTCPPCPAPELLGGPSVFLFPPKPKDTLMISRTPEVTCVVVDVSHEDPEVKFNWYVDGVEVHNAKTKPREEQYNSTYRVVSVLTVLHQDWLNGKEYKCKVSNKALPAPIEKTISKAKGQPREPQVYTLPPSREEMTKNQVSLTCLVKGFYPSDIAVEWESNGQPENNYKTTPPVLDSDGSFFLYSKLTVDKSRWQQGNVFSCSVMHEALHNHYTQKSLSLSPGK

SEQ ID NO: 578 - protein, 452 aa, Artificial Sequence; identical to SEQ ID NO: 1
  Description of Artificial Sequence: Synthetic polypeptide

SEQ ID NO: 579 - protein, 214 aa, Artificial Sequence; identical to SEQ ID NO: 6
  Description of Artificial Sequence: Synthetic polypeptide

SEQ ID NO: 580 - protein, 444 aa, Artificial Sequence
  Description of Artificial Sequence: Synthetic polypeptide
EVQLVESGGGLVQPGGSLRLSCAASGYSFTGYYIHWVRQAPGKGLEWVARVIPNAGGTSYNQKFKGRFTLSVDNSKNTAYLQMNSLRAEDTAVYYCAREGIYWWGQGTLVTVSSASTKGPSVFPLAPSSKSTSGGTAALGCLVKDYFPEPVTVSWNSGALTSGVHTFPAVLQSSGLYSLSSVVTVPSSSLGTQTYICNVNHKPSNTKVDKKVEPKSCDKTHTCPPCPAPELLGGPSVFLFPPKPKDTLMISRTPEVTCVVVDVSHEDPEVKFNWYVDGVEVHNAKTKPREEQYNSTYRVVSVLTVLHQDWLNGKEYKCKVSNKALPAPIEKTISKAKGQPREPQVYTLPPSREEMTKNQVSLTCLVKGFYPSDIAVEWESNGQPENNYKTTPPVLDSDGSFFLYSKLTVDKSRWQQGNVFSCSVMHEALHNHYTQKSLSLSPGK

SEQ ID NO: 581 - protein, 114 aa, Artificial Sequence [sequence omitted]

SEQ ID NO: 582 - protein, 8 aa, Artificial Sequence
  Description of Artificial Sequence: Synthetic peptide
GYSFTGYY

SEQ ID NO: 583 - protein, 8 aa, Artificial Sequence
  Description of Artificial Sequence: Synthetic peptide
VIPNAGGT

SEQ ID NO: 584 - protein, 7 aa, Artificial Sequence
  Description of Artificial Sequence: Synthetic peptide
AREGIYW

SEQ ID NO: 585 - protein, 219 aa, Artificial Sequence
  Description of Artificial Sequence: Synthetic polypeptide
DIQMTQSPSSLSASVGDRVTITCRSSQSLVHSNGNTFLHWYQQKPGKAPKLLIYTVSNRFSGVPSRFSGSGSGTDFTLTISSLQPEDFATYFCSQTTHVPWTFGQGTKVEIKRTVAAPSVFIFPPSDEQLKSGTASVVCLLNNFYPREAKVQWKVDNALQSGNSQESVTEQDSKDSTYSLSSTLTLSKADYEKHKVYACEVTHQGLSSPVTKSFNRGEC

SEQ ID NO: 586 - protein, 112 aa, Artificial Sequence [sequence omitted]

SEQ ID NO: 587 - protein, 11 aa, Artificial Sequence
  Description of Artificial Sequence: Synthetic peptide
QSLVHSNGNTF

SEQ ID NO: 588 - protein, 3 aa, Artificial Sequence
  Description of Artificial Sequence: Synthetic peptide
TVS

SEQ ID NO: 589 - protein, 9 aa, Artificial Sequence
  Description of Artificial Sequence: Synthetic peptide
SQTTHVPWT

SEQ ID NO: 590 - protein, 448 aa, Artificial Sequence
  Description of Artificial Sequence: Synthetic polypeptide
QLQLQESGPGLLKPSETLSLTCTVSGGSISSPGYYGGWIRQPPGKGLEWIGSIYKSGSTYHNPSLKSRVTISVDTSKNQFSLKLSSVTAADTAVYYCTRPVVRYFGWFDPWGQGTLVTVSSASTKGPSVFPLAPCSRSTSESTAALGCLVKDYFPEPVTVSWNSGALTSGVHTFPAVLQSSGLYSLSSVVTVPSSSLGTKTYTCNVDHKPSNTKVDKRVESKYGPPCPPCPAPEFEGGPSVFLFPPKPKDTLMISRTPEVTCVVVDVSQEDPEVQFNWYVDGVEVHNAKTKPREEQFNSTYRVVSVLTVLHQDWLNGKEYKCKVSNKGLPSSIEKTISKAKGQPREPQVYTLPPSQEEMTKNQVSLTCLVKGFYPSDIAVEWESNGQPENNYKTTPPVLDSDGSFFLYSRLTVDKSRWQEGNVFSCSVMHEALHNHYTQKSLSLSLGK

SEQ ID NO: 591 - protein, 121 aa, Artificial Sequence
  Description of Artificial Sequence: Synthetic polypeptide
QLQLQESGPGLLKPSETLSLTCTVSGGSISSPGYYGGWIRQPPGKGLEWIGSIYKSGSTYHNPSLKSRVTISVDTSKNQFSLKLSSVTAADTAVYYCTRPVVRYFGWFDPWGQGTLVTVSS

SEQ ID NO: 592 - protein, 10 aa, Artificial Sequence
  Description of Artificial Sequence: Synthetic peptide
GGSISSPGYY

SEQ ID NO: 593 - protein, 7 aa, Artificial Sequence
  Description of Artificial Sequence: Synthetic peptide
IYKSGST

SEQ ID NO: 594 - protein, 13 aa, Artificial Sequence
  Description of Artificial Sequence: Synthetic peptide
TRPVVRYFGWFDP

SEQ ID NO: 595 - protein, 213 aa, Artificial Sequence
  Description of Artificial Sequence: Synthetic polypeptide
AIQLTQSPSSLSASVGDRVTITCRASQGISSALAWYQQKPGKAPKLLIYDASNLESGVPSRFSGSGSGTDFTLTISSLQPEDFATYYCQQFNSYPTFGQGTKVEIKRTVAAPSVFIFPPSDEQLKSGTASVVCLLNNFYPREAKVQWKVDNALQSGNSQESVTEQDSKDSTYSLSSTLTLSKADYEKHKVYACEVTHQGLSSPVTKSFNRGEC

SEQ ID NO: 596 - protein, 106 aa, Artificial Sequence
  Description of Artificial Sequence: Synthetic polypeptide
AIQLTQSPSSLSASVGDRVTITCRASQGISSALAWYQQKPGKAPKLLIYDASNLESGVPSRFSGSGSGTDFTLTISSLQPEDFATYYCQQFNSYPTFGQGTKVEIK

SEQ ID NO: 597 - protein, 6 aa, Artificial Sequence
  Description of Artificial Sequence: Synthetic peptide
QGISSA

SEQ ID NO: 598 - protein, 3 aa, Artificial Sequence
  Description of Artificial Sequence: Synthetic peptide
DAS

SEQ ID NO: 599 - protein, 8 aa, Artificial Sequence
  Description of Artificial Sequence: Synthetic peptide
QQFNSYPT

SEQ ID NO: 600 - protein, 450 aa, Artificial Sequence
  Description of Artificial Sequence: Synthetic polypeptide
QVQLVESGGGVVQPGRSLRLSCAASGFTFSSYGMHWVRQAPGKGLEWVAVISYEESNRYHADSVKGRFTISRDNSKITLYLQMNSLRTEDTAVYYCARDGGIAAPGPDYWGQGTLVTVSSASTKGPSVFPLAPASKSTSGGTAALGCLVKDYFPEPVTVSWNSGALTSGVHTFPAVLQSSGLYSLSSVVTVPSSSLGTQTYICNVNHKPSNTKVDKRVEPKSCDKTHTCPPCPAPELLGGPSVFLFPPKPKDTLMISRTPEVTCVVVDVSHEDPEVKFNWYVDGVEVHNAKTKPREEQYNSTYRVVSVLTVLHQDWLNGKEYKCKVSNKALPAPIEKTISKAKGQPREPQVYTLPPSREEMTKNQVSLTCLVKGFYPSDIAVEWESNGQPENNYKTTPPVLDSDGSFFLYSKLTVDKSRWQQGNVFSCSVMHEALHNHYTQKSLSLSPGK

SEQ ID NO: 601 - protein, 120 aa, Artificial Sequence
  Description of Artificial Sequence: Synthetic polypeptide
QVQLVESGGGVVQPGRSLRLSCAASGFTFSSYGMHWVRQAPGKGLEWVAVISYEESNRYHADSVKGRFTISRDNSKITLYLQMNSLRTEDTAVYYCARDGGIAAPGPDYWGQGTLVTVSS

SEQ ID NO: 602 - protein, 8 aa, Artificial Sequence
  Description of Artificial Sequence: Synthetic peptide
GFTFSSYG

SEQ ID NO: 603 - protein, 8 aa, Artificial Sequence
  Description of Artificial Sequence: Synthetic peptide
ISYEESNR

SEQ ID NO: 604 - protein, 13 aa, Artificial Sequence
  Description of Artificial Sequence: Synthetic peptide
ARDGGIAAPGPDY

SEQ ID NO: 605 - protein, 219 aa, Artificial Sequence
  Description of Artificial Sequence: Synthetic polypeptide
DIVMTQSPLSLTVTPGEPASISCRSSQSLLYSNGYNYLDWYLQKPGQSPQVLISLGSNRASGVPDRFSGSGSGTDFTLKISRVEAEDVGVYYCMQARQTPFTFGPGTKVDIRRTVAAPSVFIFPPSDEQLKSGTASVVCLLNNFYPREAKVQWKVDNALQSGNSQESVTEQDSKDSTYSLSSTLTLSKADYEKHKVYACEVTHQGLSSPVTKSFNRGEC

SEQ ID NO: 606 - protein, 112 aa, Artificial Sequence
  Description of Artificial Sequence: Synthetic polypeptide
DIVMTQSPLSLTVTPGEPASISCRSSQSLLYSNGYNYLDWYLQKPGQSPQVLISLGSNRASGVPDRFSGSGSGTDFTLKISRVEAEDVGVYYCMQARQTPFTFGPGTKVDIR

SEQ ID NO: 607 - protein, 11 aa, Artificial Sequence
  Description of Artificial Sequence: Synthetic peptide
QSLLYSNGYNY

SEQ ID NO: 608 - protein, 3 aa, Artificial Sequence
  Description of Artificial Sequence: Synthetic peptide
LGS

SEQ ID NO: 609 - protein, 9 aa, Artificial Sequence
  Description of Artificial Sequence: Synthetic peptide
MQARQTPFT

SEQ ID NO: 610 - protein, 447 aa, Artificial Sequence
  Description of Artificial Sequence: Synthetic polypeptide
EVQLLESGGGLVQPGGSLRLSCAASGFTFSTYGMHWVRQAPGKGLEWLSYISGGSSYIFYADSVRGRFTISRDNSENALYLQMNSLRAEDTAVYYCARILRGGSGMDLWGQGTLVTVSSASTKGPSVFPLAPSSKSTSGGTAALGCLVKDYFPEPVTVSWNSGALTSGVHTFPAVLQSSGLYSLSSWTVPSSSLGTQTYICNVNHKPSNTKVDKKVEPKSCDKTHTCPPCPAPELLGGPSVFLFPPKPKDTLMISRTPEVTCNAVDVSHEDPEVKFNWYVDGVEVHNAKTKPREEQYNSTYRWSVLTVLHQDWLNGKEYKCKVSNKALPAPIEKTISKAKGQPREPQVYTLPPSRDELTKNQVSLTCLVKGFYPSDIAVEWESNGQPENNYKTTPPVLDSDGSFFLYSKLTVDKSRWQQGNVFSCSVMHEALHNHYTQKSLSLSPGK

SEQ ID NO: 611 - protein, 119 aa, Artificial Sequence
  Description of Artificial Sequence: Synthetic polypeptide
EVQLLESGGGLVQPGGSLRLSCAASGFTFSTYGMHWVRQAPGKGLEWLSYISGGSSYIFYADSVRGRFTISRDNSENALYLQMNSLRAEDTAVYYCARILRGGSGMDLWGQGTLVTVSS

SEQ ID NO: 612 - protein, 8 aa, Artificial Sequence
  Description of Artificial Sequence: Synthetic peptide
GFTFSTYG

SEQ ID NO: 613 - protein, 8 aa, Artificial Sequence
  Description of Artificial Sequence: Synthetic peptide
ISGGSSYI

SEQ ID NO: 614 - protein, 12 aa, Artificial Sequence
  Description of Artificial Sequence: Synthetic peptide
ARILRGGSGMDL

SEQ ID NO: 615 - protein, 217 aa, Artificial Sequence
  Description of Artificial Sequence: Synthetic polypeptide
QSVLTQPPSASGTPGQRVTISCTGSSSNIGAGYNVYWYQQLPGTAPKLLIYGNINRPSGVPDRFSGSKSGTSASLAISGLRSEDEADYYCAAWDKSISGLVFGGGTKLTVLGQPKAAPSVTLFPPSSEELQANKATLVCLISDFYPGAVTVAWKADSSPVKAGVETTTPSKQSNNKYAASSYLSLTPEQWKSHRSYSCQVTHEGSTVEKTVAPTECS

SEQ ID NO: 616 - protein, 111 aa, Artificial Sequence
  Description of Artificial Sequence: Synthetic polypeptide
QSVLTQPPSASGTPGQRVTISCTGSSSNIGAGYNVYWYQQLPGTAPKLLIYGNINRPSGVPDRFSGSKSGTSASLAISGLRSEDEADYYCAAWDKSISGLVFGGGTKLTVL

SEQ ID NO: 617 - protein, 9 aa, Artificial Sequence
  Description of Artificial Sequence: Synthetic peptide
SSNIGAGYN

SEQ ID NO: 618 - protein, 3 aa, Artificial Sequence
  Description of Artificial Sequence: Synthetic peptide
GNI

SEQ ID NO: 619 - protein, 11 aa, Artificial Sequence
  Description of Artificial Sequence: Synthetic peptide
AAWDKSISGLV

SEQ ID NO: 620 - protein, 450 aa, Artificial Sequence
  Description of Artificial Sequence: Synthetic polypeptide
QVQLVESGGGVVQPGRSLRLSCAASGFSFSSTYVCWVRQAPGKGLEWIACIYTGDGTNYSASWAKGRFTISKDSSKNTVYLQMNSLRAEDTAVYFCARPDITYGFAINFWGPGTLVTVSSASTKGPSVFPLAPSSKSTSGGTAALGCLVKDYFPEPVTVSWNSGALTSGVHTFPAVLQSSGLYSLSSVVTVPSSSLGTQTYICNVNHKPSNTKVDKKVEPKSCDKTHTCPPCPAPELLGGPSVFLFPPKPKDTLMISRTPEVTCVVVDVSHEDPEVKFNWYVDGVEVHNAKTKPREEQYNSTYRVVSVLTVLHQDWLNGKEYKCKVSNKALPAPIEKTISKAKGQPREPQVYTLPPSREEMTKNQVSLTCLVKGFYPSDIAVEWESNGQPENNYKTTPPVLDSDGSFFLYSKLTVDKSRWQQGNVFSCSVMHEALHNHYTQKSLSLSPGK

SEQ ID NO: 621 - protein, 120 aa, Artificial Sequence
  Description of Artificial Sequence: Synthetic polypeptide
QVQLVESGGGVVQPGRSLRLSCAASGFSFSSTYVCWVRQAPGKGLEWIACIYTGDGTNYSASWAKGRFTISKDSSKNTVYLQMNSLRAEDTAVYFCARPDITYGFAINFWGPGTLVTVSS

SEQ ID NO: 622 - protein, 8 aa, Artificial Sequence
  Description of Artificial Sequence: Synthetic peptide
GFSFSSTY

SEQ ID NO: 623 - protein, 8 aa, Artificial Sequence
  Description of Artificial Sequence: Synthetic peptide
IYTGDGTN

SEQ ID NO: 624 - protein, 14 aa, Artificial Sequence
  Description of Artificial Sequence: Synthetic peptide
ARPDITYGFAINFW

SEQ ID NO: 625 - protein, 215 aa, Artificial Sequence
  Description of Artificial Sequence: Synthetic polypeptide
DIQMTQSPSSLSASVGDRVTIKCQASQSISSRLAWYQQKPGKPPKLLIYRASTLASGVPSRFSGSGSGTDFTLTISSLQPEDVATYYCQCTGYGISWPIGGGTKVEIKRTVAAPSVFIFPPSDEQLKSGTASVVCLLNNFYPREAKVQWKVDNALQSGNSQESVTEQDSKDSTYSLSSTLTLSKADYEKHKVYACEVTHQGLSSPVTKSFNRGEC

SEQ ID NO: 626 - protein, 108 aa, Artificial Sequence
  Description of Artificial Sequence: Synthetic polypeptide
DIQMTQSPSSLSASVGDRVTIKCQASQSISSRLAWYQQKPGKPPKLLIYRASTLASGVPSRFSGSGSGTDFTLTISSLQPEDVATYYCQCTGYGISWPIGGGTKVEIK

SEQ ID NO: 627 - protein, 6 aa, Artificial Sequence
  Description of Artificial Sequence: Synthetic peptide
QSISSR

SEQ ID NO: 628 - protein, 3 aa, Artificial Sequence
  Description of Artificial Sequence: Synthetic peptide
RAS

SEQ ID NO: 629 - protein, 10 aa, Artificial Sequence
  Description of Artificial Sequence: Synthetic peptide
QCTGYGISWP

SEQ ID NO: 630 - protein, 452 aa, Artificial Sequence
  Description of Artificial Sequence: Synthetic polypeptide
EVQLQQSGPDLVKPGASVKISCKTSGYTFTEYIMHWVKQSHGKSLEWIGGIIPNNGGTSYNQKFKDKATMTVDKSSSTGYMELRSLTSEDSAVYYCTRREVYGRNYYALDYWGQGTLVTVSSASTKGPSVFPLAPSSKSTSGGTAALGCLVKDYFPEPVTVSWNSGALTSGVHTFPAVLQSSGLYSLSSVVTVPSSSLGTQTYICNVNHKPSNTKVDKKVEPKSCDKTHTCPPCPAPELLGGPSVFLFPPKPKDTLMISRTPEVTCVVVDVSHEDPEVKFNWYVDGVEVHNAKTKPREEQYNSTYRVVSVLTVLHQDWLNGKEYKCKVSNKALPAPIEKTISKAKGQPREPQVYTLPPSREEMTKNQVSLTCLVKGFYPSDIAVEWESNGQPENNYKTTPPVLDSDGSFFLYSKLTVDKSRWQQGNVFSCSVMHEALHNHYTQKSLSLSPGK

SEQ ID NO: 631 - protein, 122 aa, Artificial Sequence
  Description of Artificial Sequence: Synthetic polypeptide
EVQLQQSGPDLVKPGASVKISCKTSGYTFTEYIMHWVKQSHGKSLEWIGGIIPNNGGTSYNQKFKDKATMTVDKSSSTGYMELRSLTSEDSAVYYCTRREVYGRNYYALDYWGQGTLVTVSS

SEQ ID NO: 632 - protein, 8 aa, Artificial Sequence
  Description of Artificial Sequence: Synthetic peptide
GYTFTEYI

SEQ ID NO: 633 - protein, 8 aa, Artificial Sequence
  Description of Artificial Sequence: Synthetic peptide
IIPNNGGT

SEQ ID NO: 634 - protein, 15 aa, Artificial Sequence
  Description of Artificial Sequence: Synthetic peptide
TRREVYGRNYYALDY

SEQ ID NO: 635 - protein, 214 aa, Artificial Sequence
  Description of Artificial Sequence: Synthetic polypeptide
DIQMTQTTSSLSASLGDRVTITCSASQGINNYLNWYQQKPDGTVKLLIYYTSSLHSGVPSRFSGSGSGTDYSLTISNLEPEDIATYYCQQYSNLPYTFGGGTKLEIKRTVAAPSVFIFPPSDEQLKSGTASVVCLLNNFYPREAKVQWKVDNALQSGNSQESVTEQDSKDSTYSLSSTLTLSKADYEKHKVYACEVTHQGLSSPVTKSFNRGEC

SEQ ID NO: 636 - protein, 107 aa, Artificial Sequence
  Description of Artificial Sequence: Synthetic polypeptide
DIQMTQTTSSLSASLGDRVTITCSASQGINNYLNWYQQKPDGTVKLLIYYTSSLHSGVPSRFSGSGSGTDYSLTISNLEPEDIATYYCQQYSNLPYTFGGGTKLEIK

SEQ ID NO: 637 - protein, 6 aa, Artificial Sequence
  Description of Artificial Sequence: Synthetic peptide
QGINNY

SEQ ID NO: 638 - protein, 3 aa, Artificial Sequence
  Description of Artificial Sequence: Synthetic peptide
YTS

SEQ ID NO: 639 - protein, 9 aa, Artificial Sequence
  Description of Artificial Sequence: Synthetic peptide
QQYSNLPYT

SEQ ID NO: 640 - protein, 9 aa, Artificial Sequence
  Description of Artificial Sequence: Synthetic peptide
QHFWNTPWT

SEQ ID NO: 641 - protein, 9 aa, Artificial Sequence
  Description of Artificial Sequence: Synthetic peptide
QQGHTLPYT

SEQ ID NO: 642 - protein, 7 aa, Artificial Sequence
  Description of Artificial Sequence: Synthetic peptide
SNDGYYS

SEQ ID NO: 643 - protein, 7 aa, Artificial Sequence
  Description of Artificial Sequence: Synthetic peptide
RYYLGVD

SEQ ID NO: 644 - protein, 7 aa, Artificial Sequence
  Description of Artificial Sequence: Synthetic peptide
DDSGRFP

SEQ ID NO: 645 - protein, 7 aa, Artificial Sequence
  Description of Artificial Sequence: Synthetic peptide
YGYAVDY

SEQ ID NO: 646 - protein, 8 aa, Artificial Sequence
  Description of Artificial Sequence: Synthetic peptide
YYGIYVDY

SEQ ID NO: 647 - protein, 4 aa, Artificial Sequence
  Description of Artificial Sequence: Synthetic peptide
FLVY

SEQ ID NO: 648 - protein, 7 aa, Artificial Sequence
  Description of Artificial Sequence: Synthetic peptide
NFGILGY

SEQ ID NO: 649 - protein, 7 aa, Artificial Sequence
  Description of Artificial Sequence: Synthetic peptide
YPNALDY

SEQ ID NO: 650 - protein, 10 aa, Artificial Sequence
  Description of Artificial Sequence: Synthetic peptide
GLKSFYAMDH

SEQ ID NO: 651 - protein, 9 aa, Artificial Sequence
  Description of Artificial Sequence: Synthetic peptide
QQGKTLPWT

SEQ ID NO: 652 - protein, 9 aa, Artificial Sequence
  Description of Artificial Sequence: Synthetic peptide
QQGNTLPPT

SEQ ID NO: 653 - protein, 9 aa, Artificial Sequence
  Description of Artificial Sequence: Synthetic peptide
QQHYITPLT

SEQ ID NO: 654 - protein, 9 aa, Artificial Sequence
  Description of Artificial Sequence: Synthetic peptide
QQYGNLPYT

SEQ ID NO: 655 - protein, 9 aa, Artificial Sequence
  Description of Artificial Sequence: Synthetic peptide
QQYYSTPRT

SEQ ID NO: 656 - protein, 9 aa, Artificial Sequence
  Description of Artificial Sequence: Synthetic peptide
GQSYNYPPT

SEQ ID NO: 657 - protein, 9 aa, Artificial Sequence
  Description of Artificial Sequence: Synthetic peptide
WQDTHFPHV

SEQ ID NO: 658 - protein, 107 aa, Artificial Sequence; identical to SEQ ID NO: 251
  Description of Artificial Sequence: Synthetic polypeptide

SEQ ID NO: 659 - protein, 116 aa, Artificial Sequence; identical to SEQ ID NO: 246
  Description of Artificial Sequence: Synthetic polypeptide

SEQ ID NO: 660 - protein, 118 aa, Artificial Sequence
  Description of Artificial Sequence: Synthetic polypeptide
QIVESGGGLVQPKESLKISCTASGFTFSNAAIYWVRQTPGKGLEWVGRIRTRPSKYATDYADSVRGRFTISRDDSKSMVYLQMDNLRTEDTAMYYCTPRATEDVPFYWGQGVMVTVSS

SEQ ID NO: 661 - protein, 109 aa, Artificial Sequence
  Description of Artificial Sequence: Synthetic polypeptide
DIVMTQTPSSQAVSAGEKVTMNCKSSQSVLYDENKKNYLAWYQQKSGQSPKLLIYWASTGESGVPDRFIGSGSGTDFTLTISSVQAEDLAVYYCQQYYDFPPTFGGGTK

SEQ ID NO: 662 - protein, 448 aa, Artificial Sequence
  Description of Artificial Sequence: Synthetic polypeptide
QVQLQESGPGLVKPSETLSLTCVVSGGSISSSNWWSWVRQPPGKGLEWIGEIYHSGSPDYNPSLKSRVTISVDKSRNQFSLKLSSVTAADTAVYYCAKVSTGGFFDYWGQGTLVTVSSASTKGPSVFPLAPSSKSTSGGTAALGCLVKDYFPEPVTVSWNSGALTSGVHTFPAVLQSSGLYSLSSVVTVPSSSLGTQTYICNVNHKPSNTKVDKRVEPKSCDKTHTCPPCPAPELLGGPSVFLFPPKPKDTLMISRTPEVTCVVVDVSHEDPEVKFNWYVDGVEVHNAKTKPREEQYNSTYRVVSVLTVLHQDWLNGKEYKCKVSNKALPAPIEKTISKAKGQPREPQVYTLPPSREEMTKNQVSLTCLVKGFYPSDIAVEWESNGQPENNYKTTPPVLDSDGSFFLYSKLTVDKSRWQQGNVFSCSVMHEALHNHYTQKSLSLSPGK

SEQ ID NO: 663 - protein, 448 aa, Artificial Sequence
  Description of Artificial Sequence: Synthetic polypeptide
QVQLQESGPGLVKPSETLSLTCVVSGGSISSSNWWSWVRQPPGKGLEWIGEIYHSGSPNYNPSLKSRVTISVDKSKNQFSLKLSSVTAADTAVYYCARSSSGGFFDYWGQGTLVTVSSASTKGPSVFPLAPSSKSTSGGTAALGCLVKDYFPEPVTVSWNSGALTSGVHTFPAVLQSSGLYSLSSVVTVPSSSLGTQTYICNVNHKPSNTKVDKRVEPKSCDKTHTCPPCPAPELLGGPSVFLFPPKPKDTLMISRTPEVTCVVVDVSHEDPEVKFNWYVDGVEVHNAKTKPREEQYNSTYRVVSVLTVLHQDWLNGKEYKCKVSNKALPAPIEKTISKAKGQPREPQVYTLPPSREEMTKNQVSLTCLVKGFYPSDIAVEWESNGQPENNYKTTPPVLDSDGSFFLYSKLTVDKSRWQQGNVFSCSVMHEALHNHYTQKSLSLSPGK

SEQ ID NO: 664 - protein, 448 aa, Artificial Sequence
  Description of Artificial Sequence: Synthetic polypeptide
QVQLQESGPGLVKPSETLSLTCVVSGGSISSSNWWSWVRQPPGKGLEWIGEIYHSGSPNYNPSLKSRVTISVDKSKNQFSLKLSSVTAADTAVYYCARQTTAGSFDYWGQGTLVTVSSASTKGPSVFPLAPSSKSTSGGTAALGCLVKDYFPEPVTVSWNSGALTSGVHTFPAVLQSSGLYSLSSVVTVPSSSLGTQTYICNVNHKPSNTKVDKRVEPKSCDKTHTCPPCPAPELLGGPSVFLFPPKPKDTLMISRTPEVTCVVVDVSHEDPEVKFNWYVDGVEVHNAKTKPREEQYNSTYRVVSVLTVLHQDWLNGKEYKCKVSNKALPAPIEKTISKAKGQPREPQVYTLPPSREEMTKNQVSLTCLVKGFYPSDIAVEWESNGQPENNYKTTPPVLDSDGSFFLYSKLTVDKSRWQQGNVFSCSVMHEALHNHYTQKSLSLSPGK

SEQ ID NO: 665 - protein, 214 aa, Artificial Sequence
  Description of Artificial Sequence: Synthetic polypeptide
DIQMTQSPSSLSASVGDRVTITCRASQSISSYLNWYQQKPGKAPKLLIYAASSLQSGVPSRFSGSGSGTDFTLTISSLQPEDFATYYCQQSYSTPPTFGQGTKVEIKRTVAAPSVFIFPPSDEQLKSGTASVVCLLNNFYPREAKVQWKVDNALQSGNSQESVTEQDSKDSTYSLSSTLTLSKADYEKHKVYACEVTHQGLSSPVTKSFNRGEC

SEQ ID NO: 666 - protein, 450 aa, Artificial Sequence
  Description of Artificial Sequence: Synthetic polypeptide
QVQLVESGGGVVQPGRSLRLSCAASGFTLSSYGMHWVRQAPGKGLEWVAVIWYDGNDKYYADSVKGRFTISRDNSKNTLYLQVNSLRAEDTAVYYCARGTGTPYWYFDLWGRGTLVTVSSASTKGPSVFPLAPSSKSTSGGTAALGCLVKDYFPEPVTVSWNSGALTSGVHTFPAVLQSSGLYSLSSVVTVPSSSLGTQTYICNVNHKPSNTKVDKKVEPKSCDKTHTCPPCPAPELLGGPSVFLFPPKPKDTLMISRTPEVTCVVVDVSHEDPEVKFNWYVDGVEVHNAKTKPREEQYNSTYRVVSVLTVLHQDWLNGKEYKCKVSNKALPAPIEKTISKAKGQPREPQVYTLPPSRDELTKNQVSLTCLVKGFYPSDIAVEWESNGQPENNYKTTPPVLDSDGSFFLYSKLTVDKSRWQQGNVFSCSVMHEALHNHYTQKSLSLSPGK

SEQ ID NO: 667 - protein, 450 aa, Artificial Sequence
  Description of Artificial Sequence: Synthetic polypeptide
EVQLVESGGGLVQPGGSLRLSCAASGFTFSNYLMNWVRQAPGKGLEWVANIEQDGSEKYYVDSVKGRFTISRDNAKNSLYLQMNSLRAEDTAVYFCARDGDTAMITFDFWGQGTLVTVSSASTKGPSVFPLAPSSKSTSGGTAALGCLVKDYFPEPVTVSWNSGALTSGVHTFPAVLQSSGLYSLSSVVTVPSSSLGTQTYICNVNHKPSNTKVDKKVEPKSCDKTHTCPPCPAPELLGGPSVFLFPPKPKDTLMISRTPEVTCVVVDVSHEDPEVKFNWYVDGVEVHNAKTKPREEQYNSTYRVVSVLTVLHQDWLNGKEYKCKVSNKALPAPIEKTISKAKGQPREPQVYTLPPSRDELTKNQVSLTCLVKGFYPSDIAVEWESNGQPENNYKTTPPVLDSDGSFFLYSKLTVDKSRWQQGNVFSCSVMHEALHNHYTQKSLSLSPGK

SEQ ID NO: 668 - protein, 452 aa, Artificial Sequence
  Description of Artificial Sequence: Synthetic polypeptide
QVQLQESGPGLVKPSQTLSLTCTVSGGSISSGGYYWNWIRQHPGKGLEWIGYIYYSGNTYYNPSLKSRVTISVDTSKNQFSLKLSSVTAADAAVYHCARGYGDYGGGYFDYWGQGTLVTVSSASTKGPSVFPLAPSSKSTSGGTAALGCLVKDYFPEPVTVSWNSGALTSGVHTFPAVLQSSGLYSLSSVVTVPSSSLGTQTYICNVNHKPSNTKVDKKVEPKSCDKTHTCPPCPAPELLGGPSVFLFPPKPKDTLMISRTPEVTCVVVDVSHEDPEVKFNWYVDGVEVHNAKTKPREEQYNSTYRVVSVLTVLHQDWLNGKEYKCKVSNKALPAPIEKTISKAKGQPREPQVYTLPPSRDELTKNQVSLTCLVKGFYPSDIAVEWESNGQPENNYKTTPPVLDSDGSFFLYSKLTVDKSRWQQGNVFSCSVMHEALHNHYTQKSLSLSPGK

SEQ ID NO: 669 - protein, 215 aa, Artificial Sequence
  Description of Artificial Sequence: Synthetic polypeptide
EIVLTQSPATLSLSPGERATLSCRASQSVNNYLAWYQQKPGQAPRLLIYDASNRATGIPARFSGSGSGTDFTLTISSLEPEDFAVYYCQQRSTWPPYTFGQGTKLEIKRTVAAPSVFIFPPSDEQLKSGTASVVCLLNNFYPREAKVQWKVDNALQSGNSQESVTEQDSKDSTYSLSSTLTLSKADYEKHKVYACEVTHQGLSSPVTKSFNRGEC

SEQ ID NO: 670 - protein, 214 aa, Artificial Sequence
  Description of Artificial Sequence: Synthetic polypeptide
DIQMTQSPSSVSASVGDRVTITCRASQGIRRWLAWYQQKPGKAPKLLIYAASSLQRGVPSRFSGSGSGTDFTLTISSLQPEDFATYYCQQANSFPWTFGQGTKVEIKRTVAAPSVFIFPPSDEQLKSGTASVVCLLNNFYPREAKVQWKVDNALQSGNSQESVTEQDSKDSTYSLSSTLTLSKADYEKHKVYACEVTHQGLSSPVTKSFNRGEC

SEQ ID NO: 671 - protein, 214 aa, Artificial Sequence
  Description of Artificial Sequence: Synthetic polypeptide
DIQMTQSPSSLSASVGDRVTITCQASQDISNYLNWYQQKPGKAPKFLIYDVSNLETGVPSRFSGSGSGTDFTFTISSLQPEDIATYYCQQYDNLPYTFGQGTKLEIKRTVAAPSVFIFPPSDEQLKSGTASVVCLLNNFYPREAKVQWKVDNALQSGNSQESVTEQDSKDSTYSLSSTLTLSKADYEKHKVYACEVTHQGLSSPVTKSFNRGEC

SEQ ID NO: 672 - protein, 5 aa, Unknown
  Description of Unknown: Sortase A recognition motif
  MOD_RES (2)..(2): Any amino acid
LXPTG

SEQ ID NO: 673 - protein, 8 aa, Artificial Sequence
  Description of Artificial Sequence: Synthetic peptide
GFNIKDTY

SEQ ID NO: 674 - protein, 8 aa, Artificial Sequence
  Description of Artificial Sequence: Synthetic peptide
IYPTNGYT

SEQ ID NO: 675 - protein, 13 aa, Artificial Sequence
  Description of Artificial Sequence: Synthetic peptide
SRWGGDGFYAMDY

SEQ ID NO: 676 - protein, 6 aa, Artificial Sequence
  Description of Artificial Sequence: Synthetic peptide
QDVNTA

SEQ ID NO: 677 - protein, 3 aa, Artificial Sequence
  Description of Artificial Sequence: Synthetic peptide
SAS

SEQ ID NO: 678 - protein, 9 aa, Artificial Sequence
  Description of Artificial Sequence: Synthetic peptide
QQHYTTPPT

SEQ ID NO: 679 - protein, 120 aa, Artificial Sequence [sequence omitted]

SEQ ID NO: 680 - protein, 107 aa, Artificial Sequence [sequence omitted]

SEQ ID NO: 681 - protein, 450 aa, Artificial Sequence
  Description of Artificial Sequence: Synthetic polypeptide
EVQLVESGGGLVQPGGSLRLSCAASGFNIKDTYIHWVRQAPGKGLEWVARIYPTNGYTRYADSVKGRFTISADTSKNTAYLQMNSLRAEDTAVYYCSRWGGDGFYAMDYWGQGTLVTVSSASTKGPSVFPLAPSSKSTSGGTAALGCLVKDYFPEPVTVSWNSGALTSGVHTFPAVLQSSGLYSLSSVVTVPSSSLGTQTYICNVNHKPSNTKVDKKVEPKSCDKTHTCPPCPAPELLGGPSVFLFPPKPKDTLMISRTPEVTCVVVDVSHEDPEVKFNWYVDGVEVHNAKTKPREEQYNSTYRVVSVLTVLHQDWLNGKEYKCKVSNKALPAPIEKTISKAKGQPREPQVYTLPPSREEMTKNQVSLTCLVKGFYPSDIAVEWESNGQPENNYKTTPPVLDSDGSFFLYSKLTVDKSRWQQGNVFSCSVMHEALHNHYTQKSLSLSPGK

SEQ ID NO: 682 - protein, 214 aa, Artificial Sequence
  Description of Artificial Sequence: Synthetic polypeptide
DIQMTQSPSSLSASVGDRVTITCRASQDVNTAVAWYQQKPGKAPKLLIYSASFLYSGVPSRFSGSRSGTDFTLTISSLQPEDFATYYCQQHYTTPPTFGQGTKVEIKRTVAAPSVFIFPPSDEQLKSGTASVVCLLNNFYPREAKVQWKVDNALQSGNSQESVTEQDSKDSTYSLSSTLTLSKADYEKHKVYACEVTHQGLSSPVTKSFNRGEC

SEQ ID NO: 683 - protein, 712 aa, Artificial Sequence
  Description of Artificial Sequence: Synthetic polypeptide
QVQLVQSGAEVKKPGASVKVSCKASGYTFTGYYMHWVRQAPGQGLEWMGWINPDSGGTNYAQKFQGRVTMTRDTSISTAYMELNRLRSDDTAVYYCARDQPLGYCTNGVCSYFDYWGQGTLVTVSSASTKGPSVFPLAPSSKSTSGGTAALGCLVKDYFPEPVTVSWNSGALTSGVHTFPAVLQSSGLYSLSSVVTVPSSSLGTQTYICNVNHKPSNTKVDKKVEPKSCDKTHTCPPCPAPELLGGPSVFLFPPKPKDTLMISRTPEVTCVVVDVSHEDPEVKFNWYVDGVEVHNAKTKPREEQYNSTYRVVSVLTVLHQDWLNGKEYKCKVSNKALPAPIEKTISKAKGQPREPQVYTLPPSREEMTKNQVSLTCLVKGFYPSDIAVEWESNGQPENNYKTTPPVLDSDGSFFLYSKLTVDKSRWQQGNVFSCSVMHEALHNHYTQKSLSLSPGGGGGSGGGGSEVQLVESGGGLVQPGGSLRLSCAASGFNIKDTYIHWVRQAPGKGLEWVARIYPTNGYTRYADSVKGRFTISADTSKNTAYLQMNSLRAEDTAVYYCSRWGGDGFYAMDYWGQGTLVTVSSGGGGSGGGGSGGGGSGGGGSDIQMTQSPSSLSASVGDRVTITCRASQDVNTAVAWYQQKPGKAPKLLIYSASFLYSGVPSRFSGSRSGTDFTLTISSLQPEDFATYYCQQHYTTPPTFGQGTKVEIK

SEQ ID NO: 684 - protein, 712 aa, Artificial Sequence
  Description of Artificial Sequence: Synthetic polypeptide
EVQLVESGGGLVQPGGSLRLSCAASGFNIKDTYIHWVRQAPGKGLEWVARIYPTNGYTRYADSVKGRFTISADTSKNTAYLQMNSLRAEDTAVYYCSRWGGDGFYAMDYWGQGTLVTVSSASTKGPSVFPLAPSSKSTSGGTAALGCLVKDYFPEPVTVSWNSGALTSGVHTFPAVLQSSGLYSLSSVVTVPSSSLGTQTYICNVNHKPSNTKVDKKVEPKSCDKTHTCPPCPAPELLGGPSVFLFPPKPKDTLMISRTPEVTCVVVDVSHEDPEVKFNWYVDGVEVHNAKTKPREEQYNSTYRVVSVLTVLHQDWLNGKEYKCKVSNKALPAPIEKTISKAKGQPREPQVYTLPPSREEMTKNQVSLTCLVKGFYPSDIAVEWESNGQPENNYKTTPPVLDSDGSFFLYSKLTVDKSRWQQGNVFSCSVMHEALHNHYTQKSLSLSPGGGGGSGGGGSQVQLVQSGAEVKKPGASVKVSCKASGYTFTGYYMHWVRQAPGQGLEWMGWINPDSGGTNYAQKFQGRVTMTRDTSISTAYMELNRLRSDDTAVYYCARDQPLGYCTNGVCSYFDYWGQGTLVTVSSGGGGSGGGGSGGGGSGGGGSDIQMTQSPSSVSASVGDRVTITCRASQGIYSWLAWYQQKPGKAPNLLIYTASTLQSGVPSRFSGSGSGTDFTLTISSLQPEDFATYYCQQANIFPLTFGGGTKVEIK

SEQ ID NO: 685 - protein, 477 aa, Artificial Sequence
  Description of Artificial Sequence: Synthetic polypeptide
DIQMTQSPSSLSASVGDRVTITCRASQDVNTAVAWYQQKPGKAPKLLIYSASFLYSGVPSRFSGSRSGTDFTLTISSLQPEDFATYYCQQHYTTPPTFGQGTKVEIKRTVAAPSVFIFPPSDEQLKSGTASVVCLLNNFYPREAKVQWKVDNALQSGNSQESVTEQDSKDSTYSLSSTLTLSKADYEKHKVYACEVTHQGLSSPVTKSFNRGECGGGGSGGGGSQVQLVQSGAEVKKPGASVKVSCKASGYTFTGYYMHWVRQAPGQGLEWMGWINPDSGGTNYAQKFQGRVTMTRDTSISTAYMELNRLRSDDTAVYYCARDQPLGYCTNGVCSYFDYWGQGTLVTVSSGGGGSGGGGSGGGGSGGGGSDIQMTQSPSSVSASVGDRVTITCRASQGIYSWLAWYQQKPGKAPNLLIYTASTLQSGVPSRFSGSGSGTDFTLTISSLQPEDFATYYCQQANIFPLTFGGGTKVEIK

SEQ ID NO: 686 - protein, 704 aa, Artificial Sequence
  Description of Artificial Sequence: Synthetic polypeptide
QVQLVESGGGVVQPGRSLRLSCAASGFTFSNYGMYWVRQAPGKGLEWVAVIWYDGSNKYYADSVKGRFTISRDNSKNTLYLQMNSLRAEDTAVYYCARDLWGWYFDYWGQGTLVTVSSASTKGPSVFPLAPSSKSTSGGTAALGCLVKDYFPEPVTVSWNSGALTSGVHTFPAVLQSSGLYSLSSVVTVPSSSLGTQTYICNVNHKPSNTKVDKKVEPKSCDKTHTCPPCPAPELLGGPSVFLFPPKPKDTLMISRTPEVTCVVVDVSHEDPEVKFNWYVDGVEVHNAKTKPREEQYNSTYRVVSVLTVLHQDWLNGKEYKCKVSNKALPAPIEKTISKAKGQPREPQVYTLPPSREEMTKNQVSLTCLVKGFYPSDIAVEWESNGQPENNYKTTPPVLDSDGSFFLYSKLTVDKSRWQQGNVFSCSVMHEALHNHYTQKSLSLSPGGGGGSGGGGSEVQLVESGGGLVQPGGSLRLSCAASGFNIKDTYIHWVRQAPGKGLEWVARIYPTNGYTRYADSVKGRFTISADTSKNTAYLQMNSLRAEDTAVYYCSRWGGDGFYAMDYWGQGTLVTVSSGGGGSGGGGSGGGGSGGGGSDIQMTQSPSSLSASVGDRVTITCRASQDVNTAVAWYQQKPGKAPKLLIYSASFLYSGVPSRFSGSRSGTDFTLTISSLQPEDFATYYCQQHYTTPPTFGQGTKVEIK

SEQ ID NO: 687 - protein, 704 aa, Artificial Sequence
  Description of Artificial Sequence: Synthetic polypeptide
EVQLVESGGGLVQPGGSLRLSCAASGFNIKDTYIHWVRQAPGKGLEWVARIYPTNGYTRYADSVKGRFTISADTSKNTAYLQMNSLRAEDTAVYYCSRWGGDGFYAMDYWGQGTLVTVSSASTKGPSVFPLAPSSKSTSGGTAALGCLVKDYFPEPVTVSWNSGALTSGVHTFPAVLQSSGLYSLSSVVTVPSSSLGTQTYICNVNHKPSNTKVDKKVEPKSCDKTHTCPPCPAPELLGGPSVFLFPPKPKDTLMISRTPEVTCVVVDVSHEDPEVKFNWYVDGVEVHNAKTKPREEQYNSTYRVVSVLTVLHQDWLNGKEYKCKVSNKALPAPIEKTISKAKGQPREPQVYTLPPSREEMTKNQVSLTCLVKGFYPSDIAVEWESNGQPENNYKTTPPVLDSDGSFFLYSKLTVDKSRWQQGNVFSCSVMHEALHNHYTQKSLSLSPGGGGGSGGGGSQVQLVESGGGVVQPGRSLRLSCAASGFTFSNYGMYWVRQAPGKGLEWVAVIWYDGSNKYYADSVKGRFTISRDNSKNTLYLQMNSLRAEDTAVYYCARDLWGWYFDYWGQGTLVTVSSGGGGSGGGGSGGGGSGGGGSEIVLTQSPATLSLSPGERATLSCRASQSVSSYLAWYQQKPGQAPRLLIYDASNRATGIPARFSGSGSGTDFTLTISSLEPEDFAVYYCQQRRNWPLTFGGGTKVEIK

SEQ ID NO: 688 - protein, 466 aa, Artificial Sequence
  Description of Artificial Sequence: Synthetic polypeptide
DIQMTQSPSSVSASVGDRVTITCRASQGIYSWLAWYQQKPGKAPNLLIYTASTLQSGVPSRFSGSGSGTDFTLTISSLQPEDFATYYCQQANIFPLTFGGGTKVEIKRTVAAPSVFIFPPSDEQLKSGTASVVCLLNNFYPREAKVQWKVDNALQSGNSQESVTEQDSKDSTYSLSSTLTLSKADYEKHKVYACEVTHQGLSSPVTKSFNRGECGGGGSGGGGSQVQLVESGGGVVQPGRSLRLSCAASGFTFSSYAFHWVRQAPGKGLEWVAVISYDGSIKYYADSVKGRFTISRDNSKNTLYLQMNSLRAEDTAVYYCARTYYFDYWGQGTLVTVSSGGGGSGGGGSGGGGSGGGGSEIVLTQSPDFQSVTPKEKVTITCRASQSIGSSLHWYQQKPDQSPKLLIKYASQSFSGVPSRFSGSGSGTDFTLTINSLEAEDAAAYYCHQSSSLPITFGQGTRLEIK

SEQ ID NO: 689 - protein, 466 aa, Artificial Sequence
  Description of Artificial Sequence: Synthetic polypeptide
EIVLTQSPATLSLSPGERATLSCRASQSVSSYLAWYQQKPGQAPRLLIYDASNRATGIPARFSGSGSGTDFTLTISSLEPEDFAVYYCQQRRNWPLTFGGGTKVEIKRTVAAPSVFIFPPSDEQLKSGTASVVCLLNNFYPREAKVQWKVDNALQSGNSQESVTEQDSKDSTYSLSSTLTLSKADYEKHKVYACEVTHQGLSSPVTKSFNRGECGGGGSGGGGSQVQLVESGGGVVQPGRSLRLSCAASGFTFSSYAFHWVRQAPGKGLEWVAVISYDGSIKYYADSVKGRFTISRDNSKNTLYLQMNSLRAEDTAVYYCARTYYFDYWGQGTLVTVSSGGGGSGGGGSGGGGSGGGGSEIVLTQSPDFQSVTPKEKVTITCRASQSIGSSLHWYQQKPDQSPKLLIKYASQSFSGVPSRFSGSGSGTDFTLTINSLEAEDAAAYYCHQSSSLPITFGQGTRLEIK

SEQ ID NO: 690 - protein, 469 aa, Artificial Sequence
  Description of Artificial Sequence: Synthetic polypeptide
EIVLTQSPDFQSVTPKEKVTITCRASQSIGSSLHWYQQKPDQSPKLLIKYASQSFSGVPSRFSGSGSGTDFTLTINSLEAEDAAAYYCHQSSSLPITFGQGTRLEIKRTVAAPSVFIFPPSDEQLKSGTASVVCLLNNFYPREAKVQWKVDNALQSGNSQESVTEQDSKDSTYSLSSTLTLSKADYEKHKVYACEVTHQGLSSPVTKSFNRGECGGGGSGGGGSQVQLVESGGGVVQPGRSLRLSCAASGFTFSNYGMYWVRQAPGKGLEWVAVIWYDGSNKYYADSVKGRFTISRDNSKNTLYLQMNSLRAEDTAVYYCARDLWGWYFDYWGQGTLVTVSSGGGGSGGGGSGGGGSGGGGSEIVLTQSPATLSLSPGERATLSCRASQSVSSYLAWYQQKPGQAPRLLIYDASNRATGIPARFSGSGSGTDFTLTISSLEPEDFAVYYCQQRRNWPLTFGGGTKVEIK

SEQ ID NO: 691 - protein, 467 aa, Artificial Sequence
  Description of Artificial Sequence: Synthetic polypeptide
DIQMTQSPSSVSASVGDRVTITCRASQGIYSWLAWYQQKPGKAPNLLIYTASTLQSGVPSRFSGSGSGTDFTLTISSLQPEDFATYYCQQANIFPLTFGGGTKVEIKRTVAAPSVFIFPPSDEQLKSGTASVVCLLNNFYPREAKVQWKVDNALQSGNSQESVTEQDSKDSTYSLSSTLTLSKADYEKHKVYACEVTHQGLSSPVTKSFNRGECGGGGSGGGGSEVQLQESGPGLVKPSQTLSLTCTVSGYSISRDFAWNWIRQPPGKGLEWMGYISYNGNTRYQPSLKSRITISRDTSKNQFFLKLNSVTAADTATYYCVTASRGFPYWGQGTLVTVSSGGGGSGGGGSGGGGSGGGGSDIQMTQSPSSMSVSVGDRVTITCHSSQDINSNIGWLQQKPGKSFKGLIYHGTNLDDGVPSRFSGSGSGTDYTLTISSLQPEDFATYYCVQYAQFPWTFGGGTKLEIK

SEQ ID NO: 692 - protein, 467 aa, Artificial Sequence
  Description of Artificial Sequence: Synthetic polypeptide
EIVLTQSPATLSLSPGERATLSCRASQSVSSYLAWYQQKPGQAPRLLIYDASNRATGIPARFSGSGSGTDFTLTISSLEPEDFAVYYCQQRRNWPLTFGGGTKVEIKRTVAAPSVFIFPPSDEQLKSGTASVVCLLNNFYPREAKVQWKVDNALQSGNSQESVTEQDSKDSTYSLSSTLTLSKADYEKHKVYACEVTHQGLSSPVTKSFNRGECGGGGSGGGGSEVQLQESGPGLVKPSQTLSLTCTVSGYSISRDFAWNWIRQPPGKGLEWMGYISYNGNTRYQPSLKSRITISRDTSKNQFFLKLNSVTAADTATYYCVTASRGFPYWGQGTLVTVSSGGGGSGGGGSGGGGSGGGGSDIQMTQSPSSMSVSVGDRVTITCHSSQDINSNIGWLQQKPGKSFKGLIYHGTNLDDGVPSRFSGSGSGTDYTLTISSLQPEDFATYYCVQYAQFPWTFGGGTKLEIK

SEQ ID NO: 693 - protein, 469 aa, Artificial Sequence
  Description of Artificial Sequence: Synthetic polypeptide
DIQMTQSPSSMSVSVGDRVTITCHSSQDINSNIGWLQQKPGKSFKGLIYHGTNLDDGVPSRFSGSGSGTDYTLTISSLQPEDFATYYCVQYAQFPWTFGGGTKLEIKRTVAAPSVFIFPPSDEQLKSGTASVVCLLNNFYPREAKVQWKVDNALQSGNSQESVTEQDSKDSTYSLSSTLTLSKADYEKHKVYACEVTHQGLSSPVTKSFNRGECGGGGSGGGGSQVQLVESGGGVVQPGRSLRLSCAASGFTFSNYGMYWVRQAPGKGLEWVAVIWYDGSNKYYADSVKGRFTISRDNSKNTLYLQMNSLRAEDTAVYYCARDLWGWYFDYWGQGTLVTVSSGGGGSGGGGSGGGGSGGGGSEIVLTQSPATLSLSPGERATLSCRASQSVSSYLAWYQQKPGQAPRLLIYDASNRATGIPARFSGSGSGTDFTLTISSLEPEDFAVYYCQQRRNWPLTFGGGTKVEIK

SEQ ID NO: 694 - protein, 478 aa, Artificial Sequence
  Description of Artificial Sequence: Synthetic polypeptide
DIQMTQSPSSVSASVGDRVTITCRASQGIYSWLAWYQQKPGKAPNLLIYTASTLQSGVPSRFSGSGSGTDFTLTISSLQPEDFATYYCQQANIFPLTFGGGTKVEIKRTVAAPSVFIFPPSDEQLKSGTASVVCLLNNFYPREAKVQWKVDNALQSGNSQESVTEQDSKDSTYSLSSTLTLSKADYEKHKVYACEVTHQGLSSPVTKSFNRGECGGGGSGGGGSEVQLLESGGGVVQPGRSLRLSCAASGFTFSSYGMHWVRQAPGKGLEWVAVISYDGSNKYYADSVKGRFTISRDNSKNTLYLQMNSLRAEDTAVYYCAKDMGWGSGWRPYYYYGMDVWGQGTTVTVSSGGGGSGGGGSGGGGSGGGGSELQMTQSPSSLSASVGDRVTITCRTSQSISSYLNWYQQKPGQPPKLLIYWASTRESGVPDRFSGSGSGTDFTLTISSLQPEDSATYYCQQSYDIPYTFGQGTKLEIK

SEQ ID NO: 695 - protein, 478 aa, Artificial Sequence
  Description of Artificial Sequence: Synthetic polypeptide
EIVLTQSPATLSLSPGERATLSCRASQSVSSYLAWYQQKPGQAPRLLIYDASNRATGIPARFSGSGSGTDFTLTISSLEPEDFAVYYCQQRRNWPLTFGGGTKVEIKRTVAAPSVFIFPPSDEQLKSGTASVVCLLNNFYPREAKVQWKVDNALQSGNSQESVTEQDSKDSTYSLSSTLTLSKADYEKHKVYACEVTHQGLSSPVTKSFNRGECGGGGSGGGGSEVQLLESGGGVVQPGRSLRLSCAASGFTFSSYGMHWVRQAPGKGLEWVAVISYDGSNKYYADSVKGRFTISRDNSKNTLYLQMNSLRAEDTAVYYCAKDMGWGSGWRPYYYYGMDVWGQGTTVTVSSGGGGSGGGGSGGGGSGGGGSELQMTQSPSSLSASVGDRVTITCRTSQSISSYLNWYQQKPGQPPKLLIYWASTRESGVPDRFSGSGSGTDFTLTISSLQPEDSATYYCQQSYDIPYTFGQGTKLEIK

SEQ ID NO: 696 - protein, 469 aa, Artificial Sequence
  Description of Artificial Sequence: Synthetic polypeptide
ELQMTQSPSSLSASVGDRVTITCRTSQSISSYLNWYQQKPGQPPKLLIYWASTRESGVPDRFSGSGSGTDFTLTISSLQPEDSATYYCQQSYDIPYTFGQGTKLEIKRTVAAPSVFIFPPSDEQLKSGTASVVCLLNNFYPREAKVQWKVDNALQSGNSQESVTEQDSKDSTYSLSSTLTLSKADYEKHKVYACEVTHQGLSSPVTKSFNRGECGGGGSGGGGSQVQLVESGGGVVQPGRSLRLSCAASGFTFSNYGMYWVRQAPGKGLEWVAVIWYDGSNKYYADSVKGRFTISRDNSKNTLYLQMNSLRAEDTAVYYCARDLWGWYFDYWGQGTLVTVSSGGGGSGGGGSGGGGSGGGGSEIVLTQSPATLSLSPGERATLSCRASQSVSSYLAWYQQKPGQAPRLLIYDASNRATGIPARFSGSGSGTDFTLTISSLEPEDFAVYYCQQRRNWPLTFGGGTKVEIK

SEQ ID NO: 697 - protein, 480 aa, Artificial Sequence
  Description of Artificial Sequence: Synthetic polypeptide
DIQMTQSPSSVSASVGDRVTITCRASQGIYSWLAWYQQKPGKAPNLLIYTASTLQSGVPSRFSGSGSGTDFTLTISSLQPEDFATYYCQQANIFPLTFGGGTKVEIKRTVAAPSVFIFPPSDEQLKSGTASVVCLLNNFYPREAKVQWKVDNALQSGNSQESVTEQDSKDSTYSLSSTLTLSKADYEKHKVYACEVTHQGLSSPVTKSFNRGECGGGGSGGGGSQVQLVESGGGVVQSGRSLRLSCAASGFTFRNYGMHWVRQAPGKGLEWVAVIWYDGSDKYYADSVRGRFTISRDNSKNTLYLQMNSLRAEDTAVYYCARDGYDILTGNPRDFDYWGQGTLVTVSSGGGGSGGGGSGGGGSGGGGSDTVMTQTPLSSHVTLGQPASISCRSSQSLVHSDGNTYLSWLQQRPGQPPRLLIYRISRRFSGVPDRFSGSGAGTDFTLEISRVEAEDVGVYYCMQSTHVPRTFGQGTKVEIK

SEQ ID NO: 698 - protein, 480 aa, Artificial Sequence
  Description of Artificial Sequence: Synthetic polypeptide
EIVLTQSPATLSLSPGERATLSCRASQSVSSYLAWYQQKPGQAPRLLIYDASNRATGIPARFSGSGSGTDFTLTISSLEPEDFAVYYCQQRRNWPLTFGGGTKVEIKRTVAAPSVFIFPPSDEQLKSGTASVVCLLNNFYPREAKVQWKVDNALQSGNSQESVTEQDSKDSTYSLSSTLTLSKADYEKHKVYACEVTHQGLSSPVTKSFNRGECGGGGSGGGGSQVQLVESGGGVVQSGRSLRLSCAASGFTFRNYGMHWVRQAPGKGLEWVAVIWYDGSDKYYADSVRGRFTISRDNSKNTLYLQMNSLRAEDTAVYYCARDGYDILTGNPRDFDYWGQGTLVTVSSGGGGSGGGGSGGGGSGGGGSDTVMTQTPLSSHVTLGQPASISCRSSQSLVHSDGNTYLSWLQQRPGQPPRLLIYRISRRFSGVPDRFSGSGAGTDFTLEISRVEAEDVGVYYCMQSTHVPRTFGQGTKVEIK

SEQ ID NO: 699 - protein, 474 aa, Artificial Sequence
  Description of Artificial Sequence: Synthetic polypeptide
DTVMTQTPLSSHVTLGQPASISCRSSQSLVHSDGNTYLSWLQQRPGQPPRLLIYRISRRFSGVPDRFSGSGAGTDFTLEISRVEAEDVGVYYCMQSTHVPRTFGQGTKVEIKRTVAAPSVFIFPPSDEQLKSGTASVVCLLNNFYPREAKVQWKVDNALQSGNSQESVTEQDSKDSTYSLSSTLTLSKADYEKHKVYACEVTHQGLSSPVTKSFNRGECGGGGSGGGGSQVQLVESGGGVVQPGRSLRLSCAASGFTFSNYGMYWVRQAPGKGLEWVAVIWYDGSNKYYADSVKGRFTISRDNSKNTLYLQMNSLRAEDTAVYYCARDLWGWYFDYWGQGTLVTVSSGGGGSGGGGSGGGGSGGGGSEIVLTQSPATLSLSPGERATLSCRASQSVSSYLAWYQQKPGQAPRLLIYDASNRATGIPARFSGSGSGTDFTLTISSLEPEDFAVYYCQQRRNWPLTFGGGTKVEIK

SEQ ID NO: 700 - protein, 475 aa, Artificial Sequence
  Description of Artificial Sequence: Synthetic polypeptide
DIQMTQSPSSVSASVGDRVTITCRASQGIYSWLAWYQQKPGKAPNLLIYTASTLQSGVPSRFSGSGSGTDFTLTISSLQPEDFATYYCQQANIFPLTFGGGTKVEIKRTVAAPSVFIFPPSDEQLKSGTASVVCLLNNFYPREAKVQWKVDNALQSGNSQESVTEQDSKDSTYSLSSTLTLSKADYEKHKVYACEVTHQGLSSPVTKSFNRGECGGGGSGGGGSQVELVQSGAEVKKPGESLKISCKGSGYSFTSYWIGWVRQAPGKGLEWMGIIDPGDSRTRYSPSFQGQVTISADKSISTAYLQWSSLKASDTAMYYCARGQLYGGTYMDGWGQGTLVTVSSGGGGSGGGGSGGGGSGGGGSDIALTQPASVSGSPGQSITISCTGTSSDIGGYNSVSWYQQHPGKAPKLMIYGVNNRPSGVSNRFSGSKSGNTASLTISGLQAEDEADYYCSSYDIESATPVFGGGTKLTVL

SEQ ID NO: 701 - protein, 475 aa, Artificial Sequence
  Description of Artificial Sequence: Synthetic polypeptide
EIVLTQSPATLSLSPGERATLSCRASQSVSSYLAWYQQKPGQAPRLLIYDASNRATGIPARFSGSGSGTDFTLTISSLEPEDFAVYYCQQRRNWPLTFGGGTKVEIKRTVAAPSVFIFPPSDEQLKSGTASVVCLLNNFYPREAKVQWKVDNALQSGNSQESVTEQDSKDSTYSLSSTLTLSKADYEKHKVYACEVTHQGLSSPVTKSFNRGECGGGGSGGGGSQVELVQSGAEVKKPGESLKISCKGSGYSFTSYWIGWVRQAPGKGLEWMGIIDPGDSRTRYSPSFQGQVTISADKSISTAYLQWSSLKASDTAMYYCARGQLYGGTYMDGWGQGTLVTVSSGGGGSGGGGSGGGGSGGGGSDIALTQPASVSGSPGQSITISCTGTSSDIGGYNSVSWYQQHPGKAPKLMIYGVNNRPSGVSNRFSGSKSGNTASLTISGLQAEDEADYYCSSYDIESATPVFGGGTKLTVL

SEQ ID NO: 702 - protein, 472 aa, Artificial Sequence
  Description of Artificial Sequence: Synthetic polypeptide
DIALTQPASVSGSPGQSITISCTGTSSDIGGYNSVSWYQQHPGKAPKLMIYGVNNRPSGVSNRFSGSKSGNTASLTISGLQAEDEADYYCSSYDIESATPVFGGGTKLTVLGQPKAAPSVTLFPPSSEELQANKATLVCLISDFYPGAVTVAWKGDSSPVKAGVETTTPSKQSNNKYAASSYLSLTPEQWKSHRSYSCQVTHEGSTVEKTVAPTECSGGGGSGGGGSQVQLVESGGGVVQPGRSLRLSCAASGFTFSNYGMYWVRQAPGKGLEWVAVIWYDGSNKYYADSVKGRFTISRDNSKNTLYLQMNSLRAEDTAVYYCARDLWGWYFDYWGQGTLVTVSSGGGGSGGGGSGGGGSGGGGSEIVLTQSPATLSLSPGERATLSCRASQSVSSYLAWYQQKPGQAPRLLIYDASNRATGIPARFSGSGSGTDFTLTISSLEPEDFAVYYCQQRRNWPLTFGGGTKVEIK

SEQ ID NO: 703 - protein, 470 aa, Artificial Sequence
  Description of Artificial Sequence: Synthetic polypeptide
DIQMTQSPSSVSASVGDRVTITCRASQGIYSWLAWYQQKPGKAPNLLIYTASTLQSGVPSRFSGSGSGTDFTLTISSLQPEDFATYYCQQANIFPLTFGGGTKVEIKRTVAAPSVFIFPPSDEQLKSGTASVVCLLNNFYPREAKVQWKVDNALQSGNSQESVTEQDSKDSTYSLSSTLTLSKADYEKHKVYACEVTHQGLSSPVTKSFNRGECGGGGSGGGGSQVQLKQSGPGLVQPSQSLSITCTVSGFSLTNYGVHWVRQSPGKGLEWLGVIWSGGNTDYNTPFTSRLSINKDNSKSQVFFKMNSLQSNDTAIYYCARALTYYDYEFAYWGQGTLVTVSAGGGGSGGGGSGGGGSGGGGSDILLTQSPVILSVSPGERVSFSCRASQSIGTNIHWYQQRTNGSPRLLIKYASESISGIPSRFSGSGSGTDFTLSINSVESEDIADYYCQQNNNWPTTFGAGTKLELK

SEQ ID NO: 704 - protein, 470 aa, Artificial Sequence
  Description of Artificial Sequence: Synthetic polypeptide
EIVLTQSPATLSLSPGERATLSCRASQSVSSYLAWYQQKPGQAPRLLIYDASNRATGIPARFSGSGSGTDFTLTISSLEPEDFAVYYCQQRRNWPLTFGGGTKVEIKRTVAAPSVFIFPPSDEQLKSGTASVVCLLNNFYPREAKVQWKVDNALQSGNSQESVTEQDSKDSTYSLSSTLTLSKADYEKHKVYACEVTHQGLSSPVTKSFNRGECGGGGSGGGGSQVQLKQSGPGLVQPSQSLSITCTVSGFSLTNYGVHWVRQSPGKGLEWLGVIWSGGNTDYNTPFTSRLSINKDNSKSQVFFKMNSLQSNDTAIYYCARALTYYDYEFAYWGQGTLVTVSAGGGGSGGGGSGGGGSGGGGSDILLTQSPVILSVSPGERVSFSCRASQSIGTNIHWYQQRTNGSPRLLIKYASESISGIPSRFSGSGSGTDFTLSINSVESEDIADYYCQQNNNWPTTFGAGTKLELK

SEQ ID NO: 705 - protein, 469 aa, Artificial Sequence
  Description of Artificial Sequence: Synthetic polypeptide
DILLTQSPVILSVSPGERVSFSCRASQSIGTNIHWYQQRTNGSPRLLIKYASESISGIPSRFSGSGSGTDFTLSINSVESEDIADYYCQQNNNWPTTFGAGTKLELKRTVAAPSVFIFPPSDEQLKSGTASVVCLLNNFYPREAKVQWKVDNALQSGNSQESVTEQDSKDSTYSLSSTLTLSKADYEKHKVYACEVTHQGLSSPVTKSFNRGECGGGGSGGGGSQVQLVESGGGVVQPGRSLRLSCAASGFTFSNYGMYWVRQAPGKGLEWVAVIWYDGSNKYYADSVKGRFTISRDNSKNTLYLQMNSLRAEDTAVYYCARDLWGWYFDYWGQGTLVTVSSGGGGSGGGGSGGGGSGGGGSEIVLTQSPATLSLSPGERATLSCRASQSVSSYLAWYQQKPGQAPRLLIYDASNRATGIPARFSGSGSGTDFTLTISSLEPEDFAVYYCQQRRNWPLTFGGGTKVEIK

SEQ ID NO: 706 - protein, 456 aa, Artificial Sequence
  Description of Artificial Sequence: Synthetic polypeptide
DIQMTQSPSSVSASVGDRVTITCRASQGIYSWLAWYQQKPGKAPNLLIYTASTLQSGVPSRFSGSGSGTDFTLTISSLQPEDFATYYCQQANIFPLTFGGGTKVEIKRTVAAPSVFIFPPSDEQLKSGTASVVCLLNNFYPREAKVQWKVDNALQSGNSQESVTEQDSKDSTYSLSSTLTLSKADYEKHKVYACEVTHQGLSSPVTKSFNRGECGGGGSGGGGSQVQLQESGPGLVKPSQTLSLTCTVSGYAFTAYNIHWVRQAPGQGLEWMGSFDPYDGGSSYNQKFKDRLTISKDTSKNQVVLTMTNMDPVDTATYYCARGWYYFDYWGHGTLVTVSSGGGGSGGGGSGGGGSGGGGSDIVMTQTPLSLPVTPGEPASISCRASKSISKYLAWYQQKPGQAPRLLIYSGSTLQSGIPPRFSGSGYGTDFTLTINNIESEDAAYYFCQQHDESPY

SEQ ID NO: 707 - protein, 456 aa, Artificial Sequence
  Description of Artificial Sequence: Synthetic polypeptide
EIVLTQSPATLSLSPGERATLSCRASQSVSSYLAWYQQKPGQAPRLLIYDASNRATGIPARFSGSGSGTDFTLTISSLEPEDFAVYYCQQRRNWPLTFGGGTKVEIKRTVAAPSVFIFPPSDEQLKSGTASVVCLLNNFYPREAKVQWKVDNALQSGNSQESVTEQDSKDSTYSLSSTLTLSKADYEKHKVYACEVTHQGLSSPVTKSFNRGECGGGGSGGGGSQVQLQESGPGLVKPSQTLSLTCTVSGYAFTAYNIHWVRQAPGQGLEWMGSFDPYDGGSSYNQKFKDRLTISKDTSKNQVVLTMTNMDPVDTATYYCARGWYYFDYWGHGTLVTVSSGGGGSGGGGSGGGGSGGGGSDIVMTQTPLSLPVTPGEPASISCRASKSISKYLAWYQQKPGQAPRLLIYSGSTLQSGIPPRFSGSGYGTDFTLTINNIESEDAAYYFCQQHDESPY

SEQ ID NO: 708 - protein, 469 aa, Artificial Sequence
  Description of Artificial Sequence: Synthetic polypeptide
DIVMTQTPLSLPVTPGEPASISCRASKSISKYLAWYQQKPGQAPRLLIYSGSTLQSGIPPRFSGSGYGTDFTLTINNIESEDAAYYFCQQHDESPYTFGEGTKVEIKRTVAAPSVFIFPPSDEQLKSGTASVVCLLNNFYPREAKVQWKVDNALQSGNSQESVTEQDSKDSTYSLSSTLTLSKADYEKHKVYACEVTHQGLSSPVTKSFNRGECGGGGSGGGGSQVQLVESGGGVVQPGRSLRLSCAASGFTFSNYGMYWVRQAPGKGLEWVAVIWYDGSNKYYADSVKGRFTISRDNSKNTLYLQMNSLRAEDTAVYYCARDLWGWYFDYWGQGTLVTVSSGGGGSGGGGSGGGGSGGGGSEIVLTQSPATLSLSPGERATLSCRASQSVSSYLAWYQQKPGQAPRLLIYDASNRATGIPARFSGSGSGTDFTLTISSLEPEDFAVYYCQQRRNWPLTFGGGTKVEIK

SEQ ID NO: 709 - protein, 471 aa, Artificial Sequence
  Description of Artificial Sequence: Synthetic polypeptide
DIQMTQSPSSVSASVGDRVTITCRASQGIYSWLAWYQQKPGKAPNLLIYTASTLQSGVPSRFSGSGSGTDFTLTISSLQPEDFATYYCQQANIFPLTFGGGTKVEIKRTVAAPSVFIFPPSDEQLKSGTASVVCLLNNFYPREAKVQWKVDNALQSGNSQESVTEQDSKDSTYSLSSTLTLSKADYEKHKVYACEVTHQGLSSPVTKSFNRGECGGGGSGGGGSQVQLQQSGAEVKKPGASVKVSCEASGYTFPSYVLHWVKQAPGQGLEWIGYINPYNDGTQYNEKFKGKATLTRDTSINTAYMELSRLRSDDTAVYYCARGFGGSYGFAYWGQGTLVTVSSGGGGSGGGGSGGGGSGGGGSDIQLTQSPSSLSASVGDRVTMTCSASSSVSSSYLYWYQQKPGKAPKLWIYSTSNLASGVPARFSGSGSGTDFTLTISSLQPEDSASYFCHQWNRYPYTFGGGTRLEIK

SEQ ID NO: 710 - protein, 471 aa, Artificial Sequence
  Description of Artificial Sequence: Synthetic polypeptide
EIVLTQSPATLSLSPGERATLSCRASQSVSSYLAWYQQKPGQAPRLLIYDASNRATGIPARFSGSGSGTDFTLTISSLEPEDFAVYYCQQRRNWPLTFGGGTKVEIKRTVAAPSVFIFPPSDEQLKSGTASVVCLLNNFYPREAKVQWKVDNALQSGNSQESVTEQDSKDSTYSLSSTLTLSKADYEKHKVYACEVTHQGLSSPVTKSFNRGECGGGGSGGGGSQVQLQQSGAEVKKPGASVKVSCEASGYTFPSYVLHWVKQAPGQGLEWIGYINPYNDGTQYNEKFKGKATLTRDTSINTAYMELSRLRSDDTAVYYCARGFGGSYGFAYWGQGTLVTVSSGGGGSGGGGSGGGGSGGGGSDIQLTQSPSSLSASVGDRVTMTCSASSSVSSSYLYWYQQKPGKAPKLWIYSTSNLASGVPARFSGSGSGTDFTLTISSLQPEDSASYFCHQWNRYPYTFGGGTRLEIK

SEQ ID NO: 711 - protein, 470 aa, Artificial Sequence
  Description of Artificial Sequence: Synthetic polypeptide
DIQLTQSPSSLSASVGDRVTMTCSASSSVSSSYLYWYQQKPGKAPKLWIYSTSNLASGVPARFSGSGSGTDFTLTISSLQPEDSASYFCHQWNRYPYTFGGGTRLEIKRTVAAPSVFIFPPSDEQLKSGTASVVCLLNNFYPREAKVQWKVDNALQSGNSQESVTEQDSKDSTYSLSSTLTLSKADYEKHKVYACEVTHQGLSSPVTKSFNRGECGGGGSGGGGSQVQLVESGGGVVQPGRSLRLSCAASGFTFSNYGMYWVRQAPGKGLEWVAVIWYDGSNKYYADSVKGRFTISRDNSKNTLYLQMNSLRAEDTAVYYCARDLWGWYFDYWGQGTLVTVSSGGGGSGGGGSGGGGSGGGGSEIVLTQSPATLSLSPGERATLSCRASQSVSSYLAWYQQKPGQAPRLLIYDASNRATGIPARFSGSGSGTDFTLTISSLEPEDFAVYYCQQRRNWPLTFGGGTKVEIK

SEQ ID NO: 712 - protein, 475 aa, Artificial Sequence
  Description of Artificial Sequence: Synthetic polypeptide
DIQMTQSPSSVSASVGDRVTITCRASQGIYSWLAWYQQKPGKAPNLLIYTASTLQSGVPSRFSGSGSGTDFTLTISSLQPEDFATYYCQQANIFPLTFGGGTKVEIKRTVAAPSVFIFPPSDEQLKSGTASVVCLLNNFYPREAKVQWKVDNALQSGNSQESVTEQDSKDSTYSLSSTLTLSKADYEKHKVYACEVTHQGLSSPVTKSFNRGECGGGGSGGGGSQVQLVQSGAEVKKPGASVKVSCKASGYTFIDYSMHWVRQAPGQGLEWMGWINTYTGEPTYSDDFKGRVTITADTSTSTAYLELSSLRSEDTAVYYCATYYRYERDFDYWGQGTLVTVSSGGGGSGGGGSGGGGSGGGGSDIVMTQSPLSLPVTPGEPASISCRSSQSIVHSSGITYLEWYLQKPGQSPQLLIYKVSNRFSGVPDRFSGSGSGTDFTLKISRVEAEDVGVYYCFQGSHVPYTFGQGTKVEIK

SEQ ID NO: 713 - protein, 475 aa, Artificial Sequence
  Description of Artificial Sequence: Synthetic polypeptide
EIVLTQSPATLSLSPGERATLSCRASQSVSSYLAWYQQKPGQAPRLLIYDASNRATGIPARFSGSGSGTDFTLTISSLEPEDFAVYYCQQRRNWPLTFGGGTKVEIKRTVAAPSVFIFPPSDEQLKSGTASVVCLLNNFYPREAKVQWKVDNALQSGNSQESVTEQDSKDSTYSLSSTLTLSKADYEKHKVYACEVTHQGLSSPVTKSFNRGECGGGGSGGGGSQVQLVQSGAEVKKPGASVKVSCKASGYTFIDYSMHWVRQAPGQGLEWMGWINTYTGEPTYSDDFKGRVTITADTSTSTAYLELSSLRSEDTAVYYCATYYRYERDFDYWGQGTLVTVSSGGGGSGGGGSGGGGSGGGGSDIVMTQSPLSLPVTPGEPASISCRSSQSIVHSSGITYLEWYLQKPGQSPQLLIYKVSNRFSGVPDRFSGSGSGTDFTLKISRVEAEDVGVYYCFQGSHVPYTFGQGTKVEIK

SEQ ID NO: 714 - protein, 474 aa, Artificial Sequence
  Description of Artificial Sequence: Synthetic polypeptide
DIVMTQSPLSLPVTPGEPASISCRSSQSIVHSSGITYLEWYLQKPGQSPQLLIYKVSNRFSGVPDRFSGSGSGTDFTLKISRVEAEDVGVYYCFQGSHVPYTFGQGTKVEIKRTVAAPSVFIFPPSDEQLKSGTASVVCLLNNFYPREAKVQWKVDNALQSGNSQESVTEQDSKDSTYSLSSTLTLSKADYEKHKVYACEVTHQGLSSPVTKSFNRGECGGGGSGGGGSQVQLVESGGGVVQPGRSLRLSCAASGFTFSNYGMYWVRQAPGKGLEWVAVIWYDGSNKYYADSVKGRFTISRDNSKNTLYLQMNSLRAEDTAVYYCARDLWGWYFDYWGQGTLVTVSSGGGGSGGGGSGGGGSGGGGSEIVLTQSPATLSLSPGERATLSCRASQSVSSYLAWYQQKPGQAPRLLIYDASNRATGIPARFSGSGSGTDFTLTISSLEPEDFAVYYCQQRRNWPLTFGGGTKVEIK

SEQ ID NO: 715 - protein, 474 aa, Artificial Sequence
  Description of Artificial Sequence: Synthetic polypeptide
DIQMTQSPSSVSASVGDRVTITCRASQGIYSWLAWYQQKPGKAPNLLIYTASTLQSGVPSRFSGSGSGTDFTLTISSLQPEDFATYYCQQANIFPLTFGGGTKVEIKRTVAAPSVFIFPPSDEQLKSGTASVVCLLNNFYPREAKVQWKVDNALQSGNSQESVTEQDSKDSTYSLSSTLTLSKADYEKHKVYACEVTHQGLSSPVTKSFNRGECGGGGSGGGGSQIQLVQSGAEVKKPGASVKVSCKASGYTFIDYSMHWVRQAPGQGLKWMGWINTYTGEPTYSDDFKGRFAFSLDTSTSTAYLELSSLRSEDTAVYYCATYYRYERDFDYWGQGTLVTVSSGGGGSGGGGSGGGSGGGGSDVLMTQSPLSLPVTPGEPASISCRSSQSIVHSSGITYLEWYLQKPGQSPQLLIYKVSNRFSGVPDRFSGSGSGTDFTLKISRVEAEDVGVYYCFQGSHVPYTFGQGTKVEIK

SEQ ID NO: 716 - protein, 474 aa, Artificial Sequence
  Description of Artificial Sequence: Synthetic polypeptide
EIVLTQSPATLSLSPGERATLSCRASQSVSSYLAWYQQKPGQAPRLLIYDASNRATGIPARFSGSGSGTDFTLTISSLEPEDFAVYYCQQRRNWPLTFGGGTKVEIKRTVAAPSVFIFPPSDEQLKSGTASVVCLLNNFYPREAKVQWKVDNALQSGNSQESVTEQDSKDSTYSLSSTLTLSKADYEKHKVYACEVTHQGLSSPVTKSFNRGECGGGGSGGGGSQIQLVQSGAEVKKPGASVKVSCKASGYTFIDYSMHWVRQAPGQGLKWMGWINTYTGEPTYSDDFKGRFAFSLDTSTSTAYLELSSLRSEDTAVYYCATYYRYERDFDYWGQGTLVTVSSGGGGSGGGGSGGGSGGGGSDVLMTQSPLSLPVTPGEPASISCRSSQSIVHSSGITYLEWYLQKPGQSPQLLIYKVSNRFSGVPDRFSGSGSGTDFTLKISRVEAEDVGVYYCFQGSHVPYTFGQGTKVEIK

SEQ ID NO: 717 - protein, 474 aa, Artificial Sequence
  Description of Artificial Sequence: Synthetic polypeptide
DVLMTQSPLSLPVTPGEPASISCRSSQSIVHSSGITYLEWYLQKPGQSPQLLIYKVSNRFSGVPDRFSGSGSGTDFTLKISRVEAEDVGVYYCFQGSHVPYTFGQGTKVEIKRTVAAPSVFIFPPSDEQLKSGTASVVCLLNNFYPREAKVQWKVDNALQSGNSQESVTEQDSKDSTYSLSSTLTLSKADYEKHKVYACEVTHQGLSSPVTKSFNRGECGGGGSGGGGSQVQLVESGGGVVQPGRSLRLSCAASGFTFSNYGMYWVRQAPGKGLEWVAVIWYDGSNKYYADSVKGRFTISRDNSKNTLYLQMNSLRAEDTAVYYCARDLWGWYFDYWGQGTLVTVSSGGGGGSGGGGSGGGSGGGGSEIVLTQSPATLSLSPGERATLSCRASQSVSSYLAWYQQKPGQAPRLLIYDASNRATGIPARFSGSGSGTDFTLTISSLEPEDFAVYYCQQRRNWPLTFGGGTKVEIK

SEQ ID NO: 718 - protein, 467 aa, Artificial Sequence
  Description of Artificial Sequence: Synthetic polypeptide
DIQMTQSPSSVSASVGDRVTITCRASQGIYSWLAWYQQKPGKAPNLLIYTASTLQSGVPSRFSGSGSGTDFTLTISSLQPEDFATYYCQQANIFPLTFGGGTKVEIKRTVAAPSVFIFPPSDEQLKSGTASVVCLLNNFYPREAKVQWKVDNALQSGNSQESVTEQDSKDSTYSLSSTLTLSKADYEKHKVYACEVTHQGLSSPVTKSFNRGECGGGGSGGGGSQVQLQQSGAELVRPGTSVKVSCKASGYAFTNYLIEWVKQRPGQGLEWIGVINPGSGGTNYNEKFKGKATLTADKSSSTAYMQLSSLTSDDSAVYFCARDGPWFAYWGQGTLVTVSAGGGGSGGGGSGGGGSGGGGSNIVMTQSPKSMSMSVGERVTLTCKASENVVTYVSWYQQKPEQSPKLLIYGASNRYTGVPDRFTGSGSATDFTLTISSVQAEDLADYHCGQGYSYPYTFGGGTKLEIK

SEQ ID NO: 719 - protein, 467 aa, Artificial Sequence
  Description of Artificial Sequence: Synthetic polypeptide
EIVLTQSPATLSLSPGERATLSCRASQSVSSYLAWYQQKPGQAPRLLIYDASNRATGIPARFSGSGSGTDFTLTISSLEPEDFAVYYCQQRRNWPLTFGGGTKVEIKRTVAAPSVFIFPPSDEQLKSGTASVVCLLNNFYPREAKVQWKVDNALQSGNSQESVTEQDSKDSTYSLSSTLTLSKADYEKHKVYACEVTHQGLSSPVTKSFNRGECGGGGSGGGGSQVQLQQSGAELVRPGTSVKVSCKASGYAFTNYLIEWVKQRPGQGLEWIGVINPGSGGTNYNEKFKGKATLTADKSSSTAYMQLSSLTSDDSAVYFCARDGPWFAYWGQGTLVTVSAGGGGSGGGGSGGGGSGGGGSNIVMTQSPKSMSMSVGERVTLTCKASENVVTYVSWYQQKPEQSPKLLIYGASNRYTGVPDRFTGSGSATDFTLTISSVQAEDLADYHCGQGYSYPYTFGGGTKLEIK

SEQ ID NO: 720 - protein, 469 aa, Artificial Sequence
  Description of Artificial Sequence: Synthetic polypeptide
NIVMTQSPKSMSMSVGERVTLTCKASENVVTYVSWYQQKPEQSPKLLIYGASNRYTGVPDRFTGSGSATDFTLTISSVQAEDLADYHCGQGYSYPYTFGGGTKLEIKRTVAAPSVFIFPPSDEQLKSGTASVVCLLNNFYPREAKVQWKVDNALQSGNSQESVTEQDSKDSTYSLSSTLTLSKADYEKHKVYACEVTHQGLSSPVTKSFNRGECGGGGSGGGGSQVQLVESGGGVVQPGRSLRLSCAASGFTFSNYGMYWVRQAPGKGLEWVAVIWYDGSNKYYADSVKGRFTISRDNSKNTLYLQMNSLRAEDTAVYYCARDLWGWYFDYWGQGTLVTVSSGGGGSGGGGSGGGGSGGGGSEIVLTQSPATLSLSPGERATLSCRASQSVSSYLAWYQQKPGQAPRLLIYDASNRATGIPARFSGSGSGTDFTLTISSLEPEDFAVYYCQQRRNWPLTFGGGTKVEIK

SEQ ID NO: 721 - protein, 473 aa, Artificial Sequence
  Description of Artificial Sequence: Synthetic polypeptide
DIQMTQSPSSVSASVGDRVTITCRASQGIYSWLAWYQQKPGKAPNLLIYTASTLQSGVPSRFSGSGSGTDFTLTISSLQPEDFATYYCQQANIFPLTFGGGTKVEIKRTVAAPSVFIFPPSDEQLKSGTASVVCLLNNFYPREAKVQWKVDNALQSGNSQESVTEQDSKDSTYSLSSTLTLSKADYEKHKVYACEVTHQGLSSPVTKSFNRGECGGGGSGGGGSEVQLVESGGGVVQPGRSLRLSCSASGFTFSGYGLSWVRQAPGKGLEWVAMISSGGSYTYYADSVKGRFAISRDNAKNTLFLQMDSLRPEDTGVYFCARHGDDPAWFAYWGQGTPVTVSSGGGGSGGGGSGGGGSGGGGSDIQLTQSPSSLSASVGDRVTITCSVSSSISSNNLHWYQQKPGKAPKPWIYGTSNLASGVPSRFSGSGSGTDYTFTISSLQPEDIATYYCQQWSSYPYMYTFGQGTKVEIK

SEQ ID NO: 722 - protein, 473 aa, Artificial Sequence
  Description of Artificial Sequence: Synthetic polypeptide
EIVLTQSPATLSLSPGERATLSCRASQSVSSYLAWYQQKPGQAPRLLIYDASNRATGIPARFSGSGSGTDFTLTISSLEPEDFAVYYCQQRRNWPLTFGGGTKVEIKRTVAAPSVFIFPPSDEQLKSGTASVVCLLNNFYPREAKVQWKVDNALQSGNSQESVTEQDSKDSTYSLSSTLTLSKADYEKHKVYACEVTHQGLSSPVTKSFNRGECGGGGSGGGGSEVQLVESGGGVVQPGRSLRLSCSASGFTFSGYGLSWVRQAPGKGLEWVAMISSGGSYTYYADSVKGRFAISRDNAKNTLFLQMDSLRPEDTGVYFCARHGDDPAWFAYWGQGTPVTVSSGGGGSGGGGSGGGGSGGGGSDIQLTQSPSSLSASVGDRVTITCSVSSSISSNNLHWYQQKPGKAPKPWIYGTSNLASGVPSRFSGSGSGTDYTFTISSLQPEDIATYYCQQWSSYPYMYTFGQGTKVEIK

SEQ ID NO: 723 - protein, 472 aa, Artificial Sequence
  Description of Artificial Sequence: Synthetic polypeptide
DIQLTQSPSSLSASVGDRVTITCSVSSSISSNNLHWYQQKPGKAPKPWIYGTSNLASGVPSRFSGSGSGTDYTFTISSLQPEDIATYYCQQWSSYPYMYTFGQGTKVEIKRTVAAPSVFIFPPSDEQLKSGTASVVCLLNNFYPREAKVQWKVDNALQSGNSQESVTEQDSKDSTYSLSSTLTLSKADYEKHKVYACEVTHQGLSSPVTKSFNRGECGGGGSGGGGSQVQLVESGGGVVQPGRSLRLSCAASGFTFSNYGMYWVRQAPGKGLEWVAVIWYDGSNKYYADSVKGRFTISRDNSKNTLYLQMNSLRAEDTAVYYCARDLWGWYFDYWGQGTLVTVSSGGGGSGGGGSGGGGSGGGGSEIVLTQSPATLSLSPGERATLSCRASQSVSSYLAWYQQKPGQAPRLLIYDASNRATGIPARFSGSGSGTDFTLTISSLEPEDFAVYYCQQRRNWPLTFGGGTKVEIK

SEQ ID NO: 724 - protein, 467 aa, Artificial Sequence
  Description of Artificial Sequence: Synthetic polypeptide
DIQMTQSPSSVSASVGDRVTITCRASQGIYSWLAWYQQKPGKAPNLLIYTASTLQSGVPSRFSGSGSGTDFTLTISSLQPEDFATYYCQQANIFPLTFGGGTKVEIKRTVAAPSVFIFPPSDEQLKSGTASVVCLLNNFYPREAKVQWKVDNALQSGNSQESVTEQDSKDSTYSLSSTLTLSKADYEKHKVYACEVTHQGLSSPVTKSFNRGECGGGGSGGGGSQAQLVQSGAEVVKPGASVKMSCKASGYTFTSYNMHWVKQTPGQGLEWIGYIYPGNGATNYNQKFQGKATLTADPSSSTAYMQISSLTSEDSAVYFCARGDSVPFAYWGQGTLVTVSAGGGGSGGGGSGGGGSGGGGSEIVLTQSPATMSASPGERVTITCSAHSSVSFMHWFQQKPGTSPKLWIYSTSSLASGVPARFGGSGSGTSYSLTISSMEAEDAATYYCQQRSSFPLTFGAGTKLELK

SEQ ID NO: 725 - protein, 467 aa, Artificial Sequence
  Description of Artificial Sequence: Synthetic polypeptide
EIVLTQSPATLSLSPGERATLSCRASQSVSSYLAWYQQKPGQAPRLLIYDASNRATGIPARFSGSGSGTDFTLTISSLEPEDFAVYYCQQRRNWPLTFGGGTKVEIKRTVAAPSVFIFPPSDEQLKSGTASVVCLLNNFYPREAKVQWKVDNALQSGNSQESVTEQDSKDSTYSLSSTLTLSKADYEKHKVYACEVTHQGLSSPVTKSFNRGECGGGGSGGGGSQAQLVQSGAEVVKPGASVKMSCKASGYTFTSYNMHWVKQTPGQGLEWIGYIYPGNGATNYNQKFQGKATLTADPSSSTAYMQISSLTSEDSAVYFCARGDSVPFAYWGQGTLVTVSAGGGGSGGGGSGGGGSGGGGSEIVLTQSPATMSASPGERVTITCSAHSSVSFMHWFQQKPGTSPKLWIYSTSSLASGVPARFGGSGSGTSYSLTISSMEAEDAATYYCQQRSSFPLTFGAGTKLELK

SEQ ID NO: 726 - protein, 468 aa, Artificial Sequence
  Description of Artificial Sequence: Synthetic polypeptide
EIVLTQSPATMSASPGERVTITCSAHSSVSFMHWFQQKPGTSPKLWIYSTSSLASGVPARFGGSGSGTSYSLTISSMEAEDAATYYCQQRSSFPLTFGAGTKLELKRTVAAPSVFIFPPSDEQLKSGTASVVCLLNNFYPREAKVQWKVDNALQSGNSQESVTEQDSKDSTYSLSSTLTLSKADYEKHKVYACEVTHQGLSSPVTKSFNRGECGGGGSGGGGSQVQLVESGGGVVQPGRSLRLSCAASGFTFSNYGMYWVRQAPGKGLEWVAVIWYDGSNKYYADSVKGRFTISRDNSKNTLYLQMNSLRAEDTAVYYCARDLWGWYFDYWGQGTLVTVSSGGGGSGGGGSGGGGSGGGGSEIVLTQSPATLSLSPGERATLSCRASQSVSSYLAWYQQKPGQAPRLLIYDASNRATGIPARFSGSGSGTDFTLTISSLEPEDFAVYYCQQRRNWPLTFGGGTKVEIK

SEQ ID NO: 727 - protein, 475 aa, Artificial Sequence
  Description of Artificial Sequence: Synthetic polypeptide
DIQMTQSPSSVSASVGDRVTITCRASQGIYSWLAWYQQKPGKAPNLLIYTASTLQSGVPSRFSGSGSGTDFTLTISSLQPEDFATYYCQQANIFPLTFGGGTKVEIKRTVAAPSVFIFPPSDEQLKSGTASVVCLLNNFYPREAKVQWKVDNALQSGNSQESVTEQDSKDSTYSLSSTLTLSKADYEKHKVYACEVTHQGLSSPVTKSFNRGECGGGGSGGGGSQVQLQQPGAELVRPGASVKLSCKASGYTFTSYWINWVKQRPGQGLEWIGNIYPSDSYTNYNQKFKDKATLTVDKSSSTAYMQLSSPTSEDSAVYYCTRSWRGNSFDYWGQGTTLTVSSGGGGSGGGGSGGGGSGGGGSDIVMTQSPSSLTVTAGEKVTMSCKSSQSLLNSGNQKNYLTWYQQKPGQPPKLLIYWASTRESGVPDRFTGSGSGTDFTLTISSVQAEDLAVYYCQNDYSYPFTFGSGTKLEIK

SEQ ID NO: 728 - protein, 475 aa, Artificial Sequence
  Description of Artificial Sequence: Synthetic polypeptide
EIVLTQSPATLSLSPGERATLSCRASQSVSSYLAWYQQKPGQAPRLLIYDASNRATGIPARFSGSGSGTDFTLTISSLEPEDFAVYYCQQRRNWPLTFGGGTKVEIKRTVAAPSVFIFPPSDEQLKSGTASVVCLLNNFYPREAKVQWKVDNALQSGNSQESVTEQDSKDSTYSLSSTLTLSKADYEKHKVYACEVTHQGLSSPVTKSFNRGECGGGGSGGGGSQVQLQQPGAELVRPGASVKLSCKASGYTFTSYWINWVKQRPGQGLEWIGNIYPSDSYTNYNQKFKDKATLTVDKSSSTAYMQLSSPTSEDSAVYYCTRSWRGNSFDYWGQGTTLTVSSGGGGSGGGGSGGGGSGGGGSDIVMTQSPSSLTVTAGEKVTMSCKSSQSLLNSGNQKNYLTWYQQKPGQPPKLLIYWASTRESGVPDRFTGSGSGTDFTLTISSVQAEDLAVYYCQNDYSYPFTFGSGTKLEIK

SEQ ID NO: 729 - protein, 475 aa, Artificial Sequence
  Description of Artificial Sequence: Synthetic polypeptide
DIVMTQSPSSLTVTAGEKVTMSCKSSQSLLNSGNQKNYLTWYQQKPGQPPKLLIYWASTRESGVPDRFTGSGSGTDFTLTISSVQAEDLAVYYCQNDYSYPFTFGSGTKLEIKRTVAAPSVFIFPPSDEQLKSGTASVVCLLNNFYPREAKVQWKVDNALQSGNSQESVTEQDSKDSTYSLSSTLTLSKADYEKHKVYACEVTHQGLSSPVTKSFNRGECGGGGSGGGGSQVQLVESGGGVVQPGRSLRLSCAASGFTFSNYGMYWVRQAPGKGLEWVAVIWYDGSNKYYADSVKGRFTISRDNSKNTLYLQMNSLRAEDTAVYYCARDLWGWYFDYWGQGTLVTVSSGGGGSGGGGSGGGGSGGGGSEIVLTQSPATLSLSPGERATLSCRASQSVSSYLAWYQQKPGQAPRLLIYDASNRATGIPARFSGSGSGTDFTLTISSLEPEDFAVYYCQQRRNWPLTFGGGTKVEIK

SEQ ID NO: 730 - protein, 466 aa, Artificial Sequence
  Description of Artificial Sequence: Synthetic polypeptide
DIQMTQSPSSVSASVGDRVTITCRASQGIYSWLAWYQQKPGKAPNLLIYTASTLQSGVPSRFSGSGSGTDFTLTISSLQPEDFATYYCQQANIFPLTFGGGTKVEIKRTVAAPSVFIFPPSDEQLKSGTASVVCLLNNFYPREAKVQWKVDNALQSGNSQESVTEQDSKDSTYSLSSTLTLSKADYEKHKVYACEVTHQGLSSPVTKSFNRGECGGGGSGGGGSEVQLQQSGPELKKPGTSVRISCKTSGYTFTEYTIHWVKQSHGKSLEWIGNINPNNGGTTYNQKFEDKATLTVDKSSSTAYMELRSLTSEDSAVYYCAAGWNFDYWGQGTTLTVSSGGGGSGGGGSGGGGSGGGGSDIVMTQSHKFMSTSVGDRVSIICKASQDVGTAVDWYQQKPGQSPKLLIYWASTRHTGVPDRFTGSGSGTDFTLTITNVQSEDLADYFCQQYNSYPLTFGAGTMLDLK

SEQ ID NO: 731 - protein, 466 aa, Artificial Sequence
  Description of Artificial Sequence: Synthetic polypeptide
EIVLTQSPATLSLSPGERATLSCRASQSVSSYLAWYQQKPGQAPRLLIYDASNRATGIPARFSGSGSGTDFTLTISSLEPEDFAVYYCQQRRNWPLTFGGGTKVEIKRTVAAPSVFIFPPSDEQLKSGTASVVCLLNNFYPREAKVQWKVDNALQSGNSQESVTEQDSKDSTYSLSSTLTLSKADYEKHKVYACEVTHQGLSSPVTKSFNRGECGGGGSGGGGSEVQLQQSGPELKKPGTSVRISCKTSGYTFTEYTIHWVKQSHGKSLEWIGNINPNNGGTTYNQKFEDKATLTVDKSSSTAYMELRSLTSEDSAVYYCAAGWNFDYWGQGTTLTVSSGGGGSGGGGSGGGGSGGGGSDIVMTQSHKFMSTSVGDRVSIICKASQDVGTAVDWYQQKPGQSPKLLIYWASTRHTGVPDRFTGSGSGTDFTLTITNVQSEDLADYFCQQYNSYPLTFGAGTMLDLK

SEQ ID NO: 732 - protein, 469 aa, Artificial Sequence
  Description of Artificial Sequence: Synthetic polypeptide
DIVMTQSHKFMSTSVGDRVSIICKASQDVGTAVDWYQQKPGQSPKLLIYWASTRHTGVPDRFTGSGSGTDFTLTITNVQSEDLADYFCQQYNSYPLTFGAGTMLDLKRTVAAPSVFIFPPSDEQLKSGTASVVCLLNNFYPREAKVQWKVDNALQSGNSQESVTEQDSKDSTYSLSSTLTLSKADYEKHKVYACEVTHQGLSSPVTKSFNRGECGGGGSGGGGSQVQLVESGGGVVQPGRSLRLSCAASGFTFSNYGMYWVRQAPGKGLEWVAVIWYDGSNKYYADSVKGRFTISRDNSKNTLYLQMNSLRAEDTAVYYCARDLWGWYFDYWGQGTLVTVSSGGGGSGGGGSGGGGSGGGGSEIVLTQSPATLSLSPGERATLSCRASQSVSSYLAWYQQKPGQAPRLLIYDASNRATGIPARFSGSGSGTDFTLTISSLEPEDFAVYYCQQRRNWPLTFGGGTKVEIK

SEQ ID NO: 733 - protein, 466 aa, Artificial Sequence
  Description of Artificial Sequence: Synthetic polypeptide
DIQMTQSPSSVSASVGDRVTITCRASQGIYSWLAWYQQKPGKAPNLLIYTASTLQSGVPSRFSGSGSGTDFTLTISSLQPEDFATYYCQQANIFPLTFGGGTKVEIKRTVAAPSVFIFPPSDEQLKSGTASVVCLLNNFYPREAKVQWKVDNALQSGNSQESVTEQDSKDSTYSLSSTLTLSKADYEKHKVYACEVTHQGLSSPVTKSFNRGECGGGGSGGGGSEVQLQQSGPELVKPGTSVRISCKTSGYTFTEYTIHWVKQSHGKSLEWIGNINPNNGGTTYNQKFEDKATLTVDKSSSTAYMELRSLTSEDSAVYYCAAGWNFDYWGQGTTLTVSSGGGGSGGGGSGGGGSGGGGSNIVMTQSPKSMSMSVGERVTLTCKASENVVTYVSWYQQKPEQSPKLLIYGASNRYTGVPDRFTGSGSATDFTLTISSVQAEDLADYHCGQGYSYPYTFGGGTKLEIK

SEQ ID NO: 734 - protein, 466 aa, Artificial Sequence
  Description of Artificial Sequence: Synthetic polypeptide
EIVLTQSPATLSLSPGERATLSCRASQSVSSYLAWYQQKPGQAPRLLIYDASNRATGIPARFSGSGSGTDFTLTISSLEPEDFAVYYCQQRRNWPLTFGGGTKVEIKRTVAAPSVFIFPPSDEQLKSGTASVVCLLNNFYPREAKVQWKVDNALQSGNSQESVTEQDSKDSTYSLSSTLTLSKADYEKHKVYACEVTHQGLSSPVTKSFNRGECGGGGSGGGGSEVQLQQSGPELVKPGTSVRISCKTSGYTFTEYTIHWVKQSHGKSLEWIGNINPNNGGTTYNQKFEDKATLTVDKSSSTAYMELRSLTSEDSAVYYCAAGWNFDYWGQGTTLTVSSGGGGSGGGGSGGGGSGGGGSNIVMTQSPKSMSMSVGERVTLTCKASENVVTYVSWYQQKPEQSPKLLIYGASNRYTGVPDRFTGSGSATDFTLTISSVQAEDLADYHCGQGYSYPYTFGGGTKLEIK

SEQ ID NO: 735 - protein, 469 aa, Artificial Sequence; identical to SEQ ID NO: 720
  Description of Artificial Sequence: Synthetic polypeptide

SEQ ID NO: 736 - protein, 476 aa, Artificial Sequence
  Description of Artificial Sequence: Synthetic polypeptide
DIQMTQSPSSVSASVGDRVTITCRASQGIYSWLAWYQQKPGKAPNLLIYTASTLQSGVPSRFSGSGSGTDFTLTISSLQPEDFATYYCQQANIFPLTFGGGTKVEIKRTVAAPSVFIFPPSDEQLKSGTASVVCLLNNFYPREAKVQWKVDNALQSGNSQESVTEQDSKDSTYSLSSTLTLSKADYEKHKVYACEVTHQGLSSPVTKSFNRGECGGGGSGGGGSEVQLVESGGGLVQPGGSLRLSCAASGFSFSDFAMSWVRQAPGKGLEWVATIGRVAFHTYYPDSMKGRFTISRDNSKNTLYLQMNSLRAEDTAVYYCARHRGFDVGHFDFWGQGTLVTVSSGGGGSGGGGSGGGGSGGGGSDIQMTQSPSSLSASVGDRVTITCRSSETLVHSSGNTYLEWYQQKPGKAPKLLIYRVSNRFSGVPSRFSGSGSGTDFTLTISSLQPEDFATYYCFQGSFNPLTFGQGTKVEIK

SEQ ID NO: 737 - protein, 476 aa, Artificial Sequence
  Description of Artificial Sequence: Synthetic polypeptide
EIVLTQSPATLSLSPGERATLSCRASQSVSSYLAWYQQKPGQAPRLLIYDASNRATGIPARFSGSGSGTDFTLTISSLEPEDFAVYYCQQRRNWPLTFGGGTKVEIKRTVAAPSVFIFPPSDEQLKSGTASVVCLLNNFYPREAKVQWKVDNALQSGNSQESVTEQDSKDSTYSLSSTLTLSKADYEKHKVYACEVTHQGLSSPVTKSFNRGECGGGGSGGGGSEVQLVESGGGLVQPGGSLRLSCAASGFSFSDFAMSWVRQAPGKGLEWVATIGRVAFHTYYPDSMKGRFTISRDNSKNTLYLQMNSLRAEDTAVYYCARHRGFDVGHFDFWGQGTLVTVSSGGGGSGGGGSGGGGSGGGGSDIQMTQSPSSLSASVGDRVTITCRSSETLVHSSGNTYLEWYQQKPGKAPKLLIYRVSNRFSGVPSRFSGSGSGTDFTLTISSLQPEDFATYYCFQGSFNPLTFGQGTKVEIK

SEQ ID NO: 738 - protein, 474 aa, Artificial Sequence
  Description of Artificial Sequence: Synthetic polypeptide
DIQMTQSPSSLSASVGDRVTITCRSSETLVHSSGNTYLEWYQQKPGKAPKLLIYRVSNRFSGVPSRFSGSGSGTDFTLTISSLQPEDFATYYCFQGSFNPLTFGQGTKVEIKRTVAAPSVFIFPPSDEQLKSGTASVVCLLNNFYPREAKVQWKVDNALQSGNSQESVTEQDSKDSTYSLSSTLTLSKADYEKHKVYACEVTHQGLSSPVTKSFNRGECGGGGSGGGGSQVQLVESGGGVVQPGRSLRLSCAASGFTFSNYGMYWVRQAPGKGLEWVAVIWYDGSNKYYADSVKGRFTISRDNSKNTLYLQMNSLRAEDTAVYYCARDLWGWYFDYWGQGTLVTVSSGGGGSGGGGSGGGGSGGGGSEIVLTQSPATLSLSPGERATLSCRASQSVSSYLAWYQQKPGQAPRLLIYDASNRATGIPARFSGSGSGTDFTLTISSLEPEDFAVYYCQQRRNWPLTFGGGTKVEIK

SEQ ID NO: 739 - protein, 471 aa, Artificial Sequence
  Description of Artificial Sequence: Synthetic polypeptide
DIQMTQSPSSVSASVGDRVTITCRASQGIYSWLAWYQQKPGKAPNLLIYTASTLQSGVPSRFSGSGSGTDFTLTISSLQPEDFATYYCQQANIFPLTFGGGTKVEIKRTVAAPSVFIFPPSDEQLKSGTASVVCLLNNFYPREAKVQWKVDNALQSGNSQESVTEQDSKDSTYSLSSTLTLSKADYEKHKVYACEVTHQGLSSPVTKSFNRGECGGGGSGGGGSQVQLVESGGGVVQPGRSLRLSCTASGFRFRSHGMHWVRQAPGKGLEWVAVISYDGNNKLYADSVKGRITISRDNSKNTLFLQMNNVRAEDTAVYYCASPYTSDWQYFQYWGQGTLVIVSSGGGGSGGGGSGGGGSGGGGSEIVMTQSPATLSVSPGERATFSCRASQNISTTLAWYQQKPGQAPRLLIYDTSTRATGIPARFSGSGSGTEFTLTISSLQSEDLAVYYCQQSNSWPLTFGGGTKVEIK

SEQ ID NO: 740 - protein, 471 aa, Artificial Sequence
  Description of Artificial Sequence: Synthetic polypeptide
EIVLTQSPATLSLSPGERATLSCRASQSVSSYLAWYQQKPGQAPRLLIYDASNRATGIPARFSGSGSGTDFTLTISSLEPEDFAVYYCQQRRNWPLTFGGGTKVEIKRTVAAPSVFIFPPSDEQLKSGTASVVCLLNNFYPREAKVQWKVDNALQSGNSQESVTEQDSKDSTYSLSSTLTLSKADYEKHKVYACEVTHQGLSSPVTKSFNRGECGGGGSGGGGSQVQLVESGGGVVQPGRSLRLSCTASGFRFRSHGMHWVRQAPGKGLEWVAVISYDGNNKLYADSVKGRITISRDNSKNTLFLQMNNVRAEDTAVYYCASPYTSDWQYFQYWGQGTLVIVSSGGGGSGGGGSGGGGSGGGGSEIVMTQSPATLSVSPGERATFSCRASQNISTTLAWYQQKPGQAPRLLIYDTSTRATGIPARFSGSGSGTEFTLTISSLQSEDLAVYYCQQSNSWPLTFGGGTKVEIK

SEQ ID NO: 741 - protein, 469 aa, Artificial Sequence
  Description of Artificial Sequence: Synthetic polypeptide
EIVMTQSPATLSVSPGERATFSCRASQNISTTLAWYQQKPGQAPRLLIYDTSTRATGIPARFSGSGSGTEFTLTISSLQSEDLAVYYCQQSNSWPLTFGGGTKVEIKRTVAAPSVFIFPPSDEQLKSGTASVVCLLNNFYPREAKVQWKVDNALQSGNSQESVTEQDSKDSTYSLSSTLTLSKADYEKHKVYACEVTHQGLSSPVTKSFNRGECGGGGSGGGGSQVQLVESGGGVVQPGRSLRLSCAASGFTFSNYGMYWVRQAPGKGLEWVAVIWYDGSNKYYADSVKGRFTISRDNSKNTLYLQMNSLRAEDTAVYYCARDLWGWYFDYWGQGTLVTVSSGGGGSGGGGSGGGGSGGGGSEIVLTQSPATLSLSPGERATLSCRASQSVSSYLAWYQQKPGQAPRLLIYDASNRATGIPARFSGSGSGTDFTLTISSLEPEDFAVYYCQQRRNWPLTFGGGTKVEIK

SEQ ID NO: 742 - protein, 479 aa, Artificial Sequence
  Description of Artificial Sequence: Synthetic polypeptide
DIQMTQSPSSVSASVGDRVTITCRASQGIYSWLAWYQQKPGKAPNLLIYTASTLQSGVPSRFSGSGSGTDFTLTISSLQPEDFATYYCQQANIFPLTFGGGTKVEIKRTVAAPSVFIFPPSDEQLKSGTASVVCLLNNFYPREAKVQWKVDNALQSGNSQESVTEQDSKDSTYSLSSTLTLSKADYEKHKVYACEVTHQGLSSPVTKSFNRGECGGGGSGGGGSEVQLLESGGGLVQPGGSLRLSCAASGFTFSHYMMAWVRQAPGKGLEWVSRIGPSGGPTHYADSVKGRFTISRDNSKNTLYLQMNSLRAEDTAVYYCAGYDSGYDYVAVAGPAEYFQHWGQGTLVTVSSGGGGSGGGGSGGGGSGGGGSDIQMTQSPSSLSASVGDRVTITCRASQSISTWLAWYQQKPGKAPKLLIYKASNLHTGVPSRFSGSGSGTEFSLTISGLQPDDFATYYCQQYNSYSRTFGQGTKVEIK

SEQ ID NO: 743 - protein, 479 aa, Artificial Sequence
  Description of Artificial Sequence: Synthetic polypeptide
EIVLTQSPATLSLSPGERATLSCRASQSVSSYLAWYQQKPGQAPRLLIYDASNRATGIPARFSGSGSGTDFTLTISSLEPEDFAVYYCQQRRNWPLTFGGGTKVEIKRTVAAPSVFIFPPSDEQLKSGTASVVCLLNNFYPREAKVQWKVDNALQSGNSQESVTEQDSKDSTYSLSSTLTLSKADYEKHKVYACEVTHQGLSSPVTKSFNRGECGGGGSGGGGSEVQLLESGGGLVQPGGSLRLSCAASGFTFSHYMMAWVRQAPGKGLEWVSRIGPSGGPTHYADSVKGRFTISRDNSKNTLYLQMNSLRAEDTAVYYCAGYDSGYDYVAVAGPAEYFQHWGQGTLVTVSSGGGGSGGGGSGGGGSGGGGSDIQMTQSPSSLSASVGDRVTITCRASQSISTWLAWYQQKPGKAPKLLIYKASNLHTGVPSRFSGSGSGTEFSLTISGLQPDDFATYYCQQYNSYSRTFGQGTKVEIK

SEQ ID NO: 744 - protein, 469 aa, Artificial Sequence
  Description of Artificial Sequence: Synthetic polypeptide
DIQMTQSPSSLSASVGDRVTITCRASQSISTWLAWYQQKPGKAPKLLIYKASNLHTGVPSRFSGSGSGTEFSLTISGLQPDDFATYYCQQYNSYSRTFGQGTKVEIKRTVAAPSVFIFPPSDEQLKSGTASVVCLLNNFYPREAKVQWKVDNALQSGNSQESVTEQDSKDSTYSLSSTLTLSKADYEKHKVYACEVTHQGLSSPVTKSFNRGECGGGGSGGGGSQVQLVESGGGVVQPGRSLRLSCAASGFTFSNYGMYWVRQAPGKGLEWVAVIWYDGSNKYYADSVKGRFTISRDNSKNTLYLQMNSLRAEDTAVYYCARDLWGWYFDYWGQGTLVTVSSGGGGSGGGGSGGGGSGGGGSEIVLTQSPATLSLSPGERATLSCRASQSVSSYLAWYQQKPGQAPRLLIYDASNRATGIPARFSGSGSGTDFTLTISSLEPEDFAVYYCQQRRNWPLTFGGGTKVEIK

SEQ ID NO: 745 - protein, 473 aa, Artificial Sequence
  Description of Artificial Sequence: Synthetic polypeptide
DIQMTQSPSSVSASVGDRVTITCRASQGIYSWLAWYQQKPGKAPNLLIYTASTLQSGVPSRFSGSGSGTDFTLTISSLQPEDFATYYCQQANIFPLTFGGGTKVEIKRTVAAPSVFIFPPSDEQLKSGTASVVCLLNNFYPREAKVQWKVDNALQSGNSQESVTEQDSKDSTYSLSSTLTLSKADYEKHKVYACEVTHQGLSSPVTKSFNRGECGGGGSGGGGSQVQLVQSGAEVVKPGASVKISCKASGYTFTGYFMNWVKQSPGQSLEWIGRIHPYDGDTFYNQKFQGKATLTVDKSSNTAHMELLSLTSEDFAVYYCTRYDGSRAMDYWGQGTTVTVSSGGGGSGGGGSGGGGSGGGGSDIVLTQSPLSLAVSLGQPAIISCKASQSVSFAGTSLMHWYHQKPGQQPRLLIYRASNLEAGVPDRFSGSGSKTDFTLTISPVEAEDAATYYCQQSREYPYTFGGGTKLEIK

SEQ ID NO: 746 - protein, 473 aa, Artificial Sequence
  Description of Artificial Sequence: Synthetic polypeptide
EIVLTQSPATLSLSPGERATLSCRASQSVSSYLAWYQQKPGQAPRLLIYDASNRATGIPARFSGSGSGTDFTLTISSLEPEDFAVYYCQQRRNWPLTFGGGTKVEIKRTVAAPSVFIFPPSDEQLKSGTASVVCLLNNFYPREAKVQWKVDNALQSGNSQESVTEQDSKDSTYSLSSTLTLSKADYEKHKVYACEVTHQGLSSPVTKSFNRGECGGGGSGGGGSQVQLVQSGAEVVKPGASVKISCKASGYTFTGYFMNWVKQSPGQSLEWIGRIHPYDGDTFYNQKFQGKATLTVDKSSNTAHMELLSLTSEDFAVYYCTRYDGSRAMDYWGQGTTVTVSSGGGGSGGGGSGGGGSGGGGSDIVLTQSPLSLAVSLGQPAIISCKASQSVSFAGTSLMHWYHQKPGQQPRLLIYRASNLEAGVPDRFSGSGSKTDFTLTISPVEAEDAATYYCQQSREYPYTFGGGTKLEIK

SEQ ID NO: 747 - protein, 473 aa, Artificial Sequence
  Description of Artificial Sequence: Synthetic polypeptide
DIVLTQSPLSLAVSLGQPAIISCKASQSVSFAGTSLMHWYHQKPGQQPRLLIYRASNLEAGVPDRFSGSGSKTDFTLTISPVEAEDAATYYCQQSREYPYTFGGGTKLEIKRTVAAPSVFIFPPSDEQLKSGTASVVCLLNNFYPREAKVQWKVDNALQSGNSQESVTEQDSKDSTYSLSSTLTLSKADYEKHKVYACEVTHQGLSSPVTKSFNRGECGGGGSGGGGSQVQLVESGGGVVQPGRSLRLSCAASGFTFSNYGMYWVRQAPGKGLEWVAVIWYDGSNKYYADSVKGRFTISRDNSKNTLYLQMNSLRAEDTAVYYCARDLWGWYFDYWGQGTLVTVSSGGGGSGGGGSGGGGSGGGGSEIVLTQSPATLSLSPGERATLSCRASQSVSSYLAWYQQKPGQAPRLLIYDASNRATGIPARFSGSGSGTDFTLTISSLEPEDFAVYYCQQRRNWPLTFGGGTKVEIK

SEQ ID NO: 748 - protein, 473 aa, Artificial Sequence
  Description of Artificial Sequence: Synthetic polypeptide
DIQMTQSPSSVSASVGDRVTITCRASQGIYSWLAWYQQKPGKAPNLLIYTASTLQSGVPSRFSGSGSGTDFTLTISSLQPEDFATYYCQQANIFPLTFGGGTKVEIKRTVAAPSVFIFPPSDEQLKSGTASVVCLLNNFYPREAKVQWKVDNALQSGNSQESVTEQDSKDSTYSLSSTLTLSKADYEKHKVYACEVTHQGLSSPVTKSFNRGECGGGGSGGGGSEVQLVESGGGLVQPGGSLRLSCAASGFTFSSYLMTWVRQAPGKGLEWVANIKQDGSEKYYVDSVKGRFTISRDNAKNSLNLQMNSLRAEDTAVYYCTRDGYSSGRHYGMDVWGQGTTVIVSSGGGGSGGGGSGGGGSGGGGSEIVLTQSPATLSLSPGERATLSCRASQSVSRYLAWYQQKPGQAPRLLIYDASNRATGIPARFSGSGSGTDFTLTISSLEPEDFAVYYCQQRSNWPRTFGQGTKVEIK

SEQ ID NO: 749 - protein, 473 aa, Artificial Sequence
  Description of Artificial Sequence: Synthetic polypeptide
EIVLTQSPATLSLSPGERATLSCRASQSVSSYLAWYQQKPGQAPRLLIYDASNRATGIPARFSGSGSGTDFTLTISSLEPEDFAVYYCQQRRNWPLTFGGGTKVEIKRTVAAPSVFIFPPSDEQLKSGTASVVCLLNNFYPREAKVQWKVDNALQSGNSQESVTEQDSKDSTYSLSSTLTLSKADYEKHKVYACEVTHQGLSSPVTKSFNRGECGGGGSGGGGSEVQLVESGGGLVQPGGSLRLSCAASGFTFSSYLMTWVRQAPGKGLEWVANIKQDGSEKYYVDSVKGRFTISRDNAKNSLNLQMNSLRAEDTAVYYCTRDGYSSGRHYGMDVWGQGTTVIVSSGGGGSGGGGSGGGGSGGGGSEIVLTQSPATLSLSPGERATLSCRASQSVSRYLAWYQQKPGQAPRLLIYDASNRATGIPARFSGSGSGTDFTLTISSLEPEDFAVYYCQQRSNWPRTFGQGTKVEIK

SEQ ID NO: 750 - protein, 469 aa, Artificial Sequence
  Description of Artificial Sequence: Synthetic polypeptide
EIVLTQSPATLSLSPGERATLSCRASQSVSRYLAWYQQKPGQAPRLLIYDASNRATGIPARFSGSGSGTDFTLTISSLEPEDFAVYYCQQRSNWPRTFGQGTKVEIKRTVAAPSVFIFPPSDEQLKSGTASVVCLLNNFYPREAKVQWKVDNALQSGNSQESVTEQDSKDSTYSLSSTLTLSKADYEKHKVYACEVTHQGLSSPVTKSFNRGECGGGGSGGGGSQVQLVESGGGVVQPGRSLRLSCAASGFTFSNYGMYWVRQAPGKGLEWVAVIWYDGSNKYYADSVKGRFTISRDNSKNTLYLQMNSLRAEDTAVYYCARDLWGWYFDYWGQGTLVTVSSGGGGSGGGGSGGGGSGGGGSEIVLTQSPATLSLSPGERATLSCRASQSVSSYLAWYQQKPGQAPRLLIYDASNRATGIPARFSGSGSGTDFTLTISSLEPEDFAVYYCQQRRNWPLTFGGGTKVEIK

SEQ ID NO: 751 - protein, 479 aa, Artificial Sequence
  Description of Artificial Sequence: Synthetic polypeptide
DIQMTQSPSSVSASVGDRVTITCRASQGIYSWLAWYQQKPGKAPNLLIYTASTLQSGVPSRFSGSGSGTDFTLTISSLQPEDFATYYCQQANIFPLTFGGGTKVEIKRTVAAPSVFIFPPSDEQLKSGTASVVCLLNNFYPREAKVQWKVDNALQSGNSQESVTEQDSKDSTYSLSSTLTLSKADYEKHKVYACEVTHQGLSSPVTKSFNRGECGGGGSGGGGSQVQLQQSGAEVKKPGSSVKVSCKASGYTFTNYYIYWVRQAPGQGLEWIGGINPTSGGSNFNEKFKTRVTITVDESTNTAYMELSSLRSEDTAFYFCARQGLWFDSDGRGFDFWGQGSTVTVSSGGGGSGGGGSGGGGSGGGGSDIQMTQSPSSLSASVGDRVTITCRSSQNIVHSNGNTYLDWYQQTPGKAPKLLIYKVSNRFSGVPSRFSGSGSGTDFTFTISSLQPEDIATYYCFQYSHVPWTFGQGTKLEIK

SEQ ID NO: 752 - protein, 479 aa, Artificial Sequence
  Description of Artificial Sequence: Synthetic polypeptide
EIVLTQSPATLSLSPGERATLSCRASQSVSSYLAWYQQKPGQAPRLLIYDASNRATGIPARFSGSGSGTDFTLTISSLEPEDFAVYYCQQRRNWPLTFGGGTKVEIKRTVAAPSVFIFPPSDEQLKSGTASVVCLLNNFYPREAKVQWKVDNALQSGNSQESVTEQDSKDSTYSLSSTLTLSKADYEKHKVYACEVTHQGLSSPVTKSFNRGECGGGGSGGGGSQVQLQQSGAEVKKPGSSVKVSCKASGYTFTNYYIYWVRQAPGQGLEWIGGINPTSGGSNFNEKFKTRVTITVDESTNTAYMELSSLRSEDTAFYFCARQGLWFDSDGRGFDFWGQGSTVTVSSGGGGSGGGGSGGGGSGGGGSDIQMTQSPSSLSASVGDRVTITCRSSQNIVHSNGNTYLDWYQQTPGKAPKLLIYKVSNRFSGVPSRFSGSGSGTDFTFTISSLQPEDIATYYCFQYSHVPWTFGQGTKLEIK

SEQ ID NO: 753 - protein, 474 aa, Artificial Sequence
  Description of Artificial Sequence: Synthetic polypeptide
DIQMTQSPSSLSASVGDRVTITCRSSQNIVHSNGNTYLDWYQQTPGKAPKLLIYKVSNRFSGVPSRFSGSGSGTDFTFTISSLQPEDIATYYCFQYSHVPWTFGQGTKLEIKRTVAAPSVFIFPPSDEQLKSGTASVVCLLNNFYPREAKVQWKVDNALQSGNSQESVTEQDSKDSTYSLSSTLTLSKADYEKHKVYACEVTHQGLSSPVTKSFNRGECGGGGSGGGGSQVQLVESGGGVVQPGRSLRLSCAASGFTFSNYGMYWVRQAPGKGLEWVAVIWYDGSNKYYADSVKGRFTISRDNSKNTLYLQMNSLRAEDTAVYYCARDLWGWYFDYWGQGTLVTVSSGGGGSGGGGSGGGGSGGGGSEIVLTQSPATLSLSPGERATLSCRASQSVSSYLAWYQQKPGQAPRLLIYDASNRATGIPARFSGSGSGTDFTLTISSLEPEDFAVYYCQQRRNWPLTFGGGTKVEIK

SEQ ID NO: 754 - protein, 474 aa, Artificial Sequence
  Description of Artificial Sequence: Synthetic polypeptide
DIQMTQSPSSVSASVGDRVTITCRASQGIYSWLAWYQQKPGKAPNLLIYTASTLQSGVPSRFSGSGSGTDFTLTISSLQPEDFATYYCQQANIFPLTFGGGTKVEIKRTVAAPSVFIFPPSDEQLKSGTASVVCLLNNFYPREAKVQWKVDNALQSGNSQESVTEQDSKDSTYSLSSTLTLSKADYEKHKVYACEVTHQGLSSPVTKSFNRGECGGGGSGGGGSQVQLVQSGGGVVRPGGSLRLSCAASGFSFIDYGMSWVRQVPGKGLEWVAGMNWSGDKKGHAESVKGRFIISRDNAKNTLYLEMSSLRVEDTALYFCARGEYSNRFDPRGRGTLVTVSSGGGGSGGGGSGGGGSGGGGSDIVMTQTPLSLPVTLGQPASLSCRSSQSLVFTDGNTYLNWFQQRPGQSPRRLIYKVSSRDPGVPDRFSGTGSGTDFTLEISRVEAEDIGVYYCMQGTHWPPIFGQGTKVEIK

SEQ ID NO: 755 - protein, 474 aa, Artificial Sequence
  Description of Artificial Sequence: Synthetic polypeptide
EIVLTQSPATLSLSPGERATLSCRASQSVSSYLAWYQQKPGQAPRLLIYDASNRATGIPARFSGSGSGTDFTLTISSLEPEDFAVYYCQQRRNWPLTFGGGTKVEIKRTVAAPSVFIFPPSDEQLKSGTASVVCLLNNFYPREAKVQWKVDNALQSGNSQESVTEQDSKDSTYSLSSTLTLSKADYEKHKVYACEVTHQGLSSPVTKSFNRGECGGGGSGGGGSQVQLVQSGGGVVRPGGSLRLSCAASGFSFIDYGMSWVRQVPGKGLEWVAGMNWSGDKKGHAESVKGRFIISRDNAKNTLYLEMSSLRVEDTALYFCARGEYSNRFDPRGRGTLVTVSSGGGGSGGGGSGGGGSGGGGSDIVMTQTPLSLPVTLGQPASLSCRSSQSLVFTDGNTYLNWFQQRPGQSPRRLIYKVSSRDPGVPDRFSGTGSGTDFTLEISRVEAEDIGVYYCMQGTHWPPIFGQGTKVEIK

SEQ ID NO: 756 - protein, 474 aa, Artificial Sequence
  Description of Artificial Sequence: Synthetic polypeptide
DIVMTQTPLSLPVTLGQPASLSCRSSQSLVFTDGNTYLNWFQQRPGQSPRRLIYKVSSRDPGVPDRFSGTGSGTDFTLEISRVEAEDIGVYYCMQGTHWPPIFGQGTKVEIKRTVAAPSVFIFPPSDEQLKSGTASVVCLLNNFYPREAKVQWKVDNALQSGNSQESVTEQDSKDSTYSLSSTLTLSKADYEKHKVYACEVTHQGLSSPVTKSFNRGECGGGGSGGGGSQVQLVESGGGVVQPGRSLRLSCAASGFTFSNYGMYWVRQAPGKGLEWVAVIWYDGSNKYYADSVKGRFTISRDNSKNTLYLQMNSLRAEDTAVYYCARDLWGWYFDYWGQGTLVTVSSGGGGSGGGGSGGGGSGGGGSEIVLTQSPATLSLSPGERATLSCRASQSVSSYLAWYQQKPGQAPRLLIYDASNRATGIPARFSGSGSGTDFTLTISSLEPEDFAVYYCQQRRNWPLTFGGGTKVEIK

SEQ ID NO: 757 - protein, 476 aa, Artificial Sequence
  Description of Artificial Sequence: Synthetic polypeptide
DIQMTQSPSSVSASVGDRVTITCRASQGIYSWLAWYQQKPGKAPNLLIYTASTLQSGVPSRFSGSGSGTDFTLTISSLQPEDFATYYCQQANIFPLTFGGGTKVEIKRTVAAPSVFIFPPSDEQLKSGTASVVCLLNNFYPREAKVQWKVDNALQSGNSQESVTEQDSKDSTYSLSSTLTLSKADYEKHKVYACEVTHQGLSSPVTKSFNRGECGGGGSGGGGSEVQLVESGGGLVQPGGSLRLSCAASGYTFTSYWLHWVRQAPGKGLEWVGMIDPSNSDTRFNPNFKDRFTISADTSKNTAYLQMNSLRAEDTAVYYCATYRSYVTPLDYWGQGTLVTVSSGGGGSGGGGSGGGGSGGGGSDIQMTQSPSSLSASVGDRVTITCKSSQSLLYTSSQKNYLAWYQQKPGKAPKLLIYWASTRESGVPSRFSGSGSGTDFTLTISSLQPEDFATYYCQQYYAYPWTFGQGTKVEIK

SEQ ID NO: 758 - protein, 476 aa, Artificial Sequence
  Description of Artificial Sequence: Synthetic polypeptide
EIVLTQSPATLSLSPGERATLSCRASQSVSSYLAWYQQKPGQAPRLLIYDASNRATGIPARFSGSGSGTDFTLTISSLEPEDFAVYYCQQRRNWPLTFGGGTKVEIKRTVAAPSVFIFPPSDEQLKSGTASVVCLLNNFYPREAKVQWKVDNALQSGNSQESVTEQDSKDSTYSLSSTLTLSKADYEKHKVYACEVTHQGLSSPVTKSFNRGECGGGGSGGGGSEVQLVESGGGLVQPGGSLRLSCAASGYTFTSYWLHWVRQAPGKGLEWVGMIDPSNSDTRFNPNFKDRFTISADTSKNTAYLQMNSLRAEDTAVYYCATYRSYVTPLDYWGQGTLVTVSSGGGGSGGGGSGGGGSGGGGSDIQMTQSPSSLSASVGDRVTITCKSSQSLLYTSSQKNYLAWYQQKPGKAPKLLIYWASTRESGVPSRFSGSGSGTDFTLTISSLQPEDFATYYCQQYYAYPWTFGQGTKVEIK

SEQ ID NO: 759 - protein, 475 aa, Artificial Sequence
  Description of Artificial Sequence: Synthetic polypeptide
DIQMTQSPSSLSASVGDRVTITCKSSQSLLYTSSQKNYLAWYQQKPGKAPKLLIYWASTRESGVPSRFSGSGSGTDFTLTISSLQPEDFATYYCQQYYAYPWTFGQGTKVEIKRTVAAPSVFIFPPSDEQLKSGTASVVCLLNNFYPREAKVQWKVDNALQSGNSQESVTEQDSKDSTYSLSSTLTLSKADYEKHKVYACEVTHQGLSSPVTKSFNRGECGGGGSGGGGSQVQLVESGGGVVQPGRSLRLSCAASGFTFSNYGMYWVRQAPGKGLEWVAVIWYDGSNKYYADSVKGRFTISRDNSKNTLYLQMNSLRAEDTAVYYCARDLWGWYFDYWGQGTLVTVSSGGGGSGGGGSGGGGSGGGGSEIVLTQSPATLSLSPGERATLSCRASQSVSSYLAWYQQKPGQAPRLLIYDASNRATGIPARFSGSGSGTDFTLTISSLEPEDFAVYYCQQRRNWPLTFGGGTKVEIK

SEQ ID NO: 760 - protein, 470 aa, Artificial Sequence
  Description of Artificial Sequence: Synthetic polypeptide
DIQMTQSPSSVSASVGDRVTITCRASQGIYSWLAWYQQKPGKAPNLLIYTASTLQSGVPSRFSGSGSGTDFTLTISSLQPEDFATYYCQQANIFPLTFGGGTKVEIKRTVAAPSVFIFPPSDEQLKSGTASVVCLLNNFYPREAKVQWKVDNALQSGNSQESVTEQDSKDSTYSLSSTLTLSKADYEKHKVYACEVTHQGLSSPVTKSFNRGECGGGGSGGGGSQVQLQESGPGLVKPSETLSLTCTVSGGSVSSGDYYWTWIRQSPGKGLEWIGHIYYSGNTNYNPSLKSRLTISIDTSKTQFSLKLSSVTAADTAIYYCVRDRVTGAFDIWGQGTMVTVSSGGGGSGGGGSGGGGSGGGGSDIQMTQSPSSLSASVGDRVTITCQASQDISNYLNWYQQKPGKAPKLLIYDASNLETGVPSRFSGSGSGTDFTFTISSLQPEDIATYFCQHFDHLPLAFGGGTKVEIK

SEQ ID NO: 761 - protein, 470 aa, Artificial Sequence
  Description of Artificial Sequence: Synthetic polypeptide
EIVLTQSPATLSLSPGERATLSCRASQSVSSYLAWYQQKPGQAPRLLIYDASNRATGIPARFSGSGSGTDFTLTISSLEPEDFAVYYCQQRRNWPLTFGGGTKVEIKRTVAAPSVFIFPPSDEQLKSGTASVVCLLNNFYPREAKVQWKVDNALQSGNSQESVTEQDSKDSTYSLSSTLTLSKADYEKHKVYACEVTHQGLSSPVTKSFNRGECGGGGSGGGGSQVQLQESGPGLVKPSETLSLTCTVSGGSVSSGDYYWTWIRQSPGKGLEWIGHIYYSGNTNYNPSLKSRLTISIDTSKTQFSLKLSSVTAADTAIYYCVRDRVTGAFDIWGQGTMVTVSSGGGGSGGGGSGGGGSGGGGSDIQMTQSPSSLSASVGDRVTITCQASQDISNYLNWYQQKPGKAPKLLIYDASNLETGVPSRFSGSGSGTDFTFTISSLQPEDIATYFCQHFDHLPLAFGGGTKVEIK

SEQ ID NO: 762 - protein, 469 aa, Artificial Sequence
  Description of Artificial Sequence: Synthetic polypeptide
DIQMTQSPSSLSASVGDRVTITCQASQDISNYLNWYQQKPGKAPKLLIYDASNLETGVPSRFSGSGSGTDFTFTISSLQPEDIATYFCQHFDHLPLAFGGGTKVEIKRTVAAPSVFIFPPSDEQLKSGTASVVCLLNNFYPREAKVQWKVDNALQSGNSQESVTEQDSKDSTYSLSSTLTLSKADYEKHKVYACEVTHQGLSSPVTKSFNRGECGGGGSGGGGSQVQLVESGGGVVQPGRSLRLSCAASGFTFSNYGMYWVRQAPGKGLEWVAVIWYDGSNKYYADSVKGRFTISRDNSKNTLYLQMNSLRAEDTAVYYCARDLWGWYFDYWGQGTLVTVSSGGGGSGGGGSGGGGSGGGGSEIVLTQSPATLSLSPGERATLSCRASQSVSSYLAWYQQKPGQAPRLLIYDASNRATGIPARFSGSGSGTDFTLTISSLEPEDFAVYYCQQRRNWPLTFGGGTKVEIK

SEQ ID NO: 763 - protein, 474 aa, Artificial Sequence
  Description of Artificial Sequence: Synthetic polypeptide
DIQMTQSPSSVSASVGDRVTITCRASQGIYSWLAWYQQKPGKAPNLLIYTASTLQSGVPSRFSGSGSGTDFTLTISSLQPEDFATYYCQQANIFPLTFGGGTKVEIKRTVAAPSVFIFPPSDEQLKSGTASVVCLLNNFYPREAKVQWKVDNALQSGNSQESVTEQDSKDSTYSLSSTLTLSKADYEKHKVYACEVTHQGLSSPVTKSFNRGECGGGGSGGGGSQVQLQQWGAGLLKPSETLSLTCAVYGGSFSGYYWSWIRQPPGKGLEWIGEINHSGSTNYNPSLKSRVTISVETSKNQFSLKLSSVTAADTAVYYCARDKWTWYFDLWGRGTLVTVSSGGGGSGGGGSGGGGSGGGGSDIEMTQSPDSLAVSLGERATINCRSSQSVLYSSSNRNYLAWYQQNPGQPPKLLIYWASTRESGVPDRFSGSGSGTDFTLTISSLQAEDVAVYYCQQYYSTPRTFGQGTKVEIK

SEQ ID NO: 764 - protein, 474 aa, Artificial Sequence
  Description of Artificial Sequence: Synthetic polypeptide
EIVLTQSPATLSLSPGERATLSCRASQSVSSYLAWYQQKPGQAPRLLIYDASNRATGIPARFSGSGSGTDFTLTISSLEPEDFAVYYCQQRRNWPLTFGGGTKVEIKRTVAAPSVFIFPPSDEQLKSGTASVVCLLNNFYPREAKVQWKVDNALQSGNSQESVTEQDSKDSTYSLSSTLTLSKADYEKHKVYACEVTHQGLSSPVTKSFNRGECGGGGSGGGGSQVQLQQWGAGLLKPSETLSLTCAVYGGSFSGYYWSWIRQPPGKGLEWIGEINHSGSTNYNPSLKSRVTISVETSKNQFSLKLSSVTAADTAVYYCARDKWTWYFDLWGRGTLVTVSSGGGGSGGGGSGGGGSGGGGSDIEMTQSPDSLAVSLGERATINCRSSQSVLYSSSNRNYLAWYQQNPGQPPKLLIYWASTRESGVPDRFSGSGSGTDFTLTISSLQAEDVAVYYCQQYYSTPRTFGQGTKVEIK

SEQ ID NO: 765 - protein, 475 aa, Artificial Sequence
  Description of Artificial Sequence: Synthetic polypeptide
DIEMTQSPDSLAVSLGERATINCRSSQSVLYSSSNRNYLAWYQQNPGQPPKLLIYWASTRESGVPDRFSGSGSGTDFTLTISSLQAEDVAVYYCQQYYSTPRTFGQGTKVEIKRTVAAPSVFIFPPSDEQLKSGTASVVCLLNNFYPREAKVQWKVDNALQSGNSQESVTEQDSKDSTYSLSSTLTLSKADYEKHKVYACEVTHQGLSSPVTKSFNRGECGGGGSGGGGSQVQLVESGGGVVQPGRSLRLSCAASGFTFSNYGMYWVRQAPGKGLEWVAVIWYDGSNKYYADSVKGRFTISRDNSKNTLYLQMNSLRAEDTAVYYCARDLWGWYFDYWGQGTLVTVSSGGGGSGGGGSGGGGSGGGGSEIVLTQSPATLSLSPGERATLSCRASQSVSSYLAWYQQKPGQAPRLLIYDASNRATGIPARFSGSGSGTDFTLTISSLEPEDFAVYYCQQRRNWPLTFGGGTKVEIK

SEQ ID NO: 766 - protein, 470 aa, Artificial Sequence
  Description of Artificial Sequence: Synthetic polypeptide
DIQMTQSPSSVSASVGDRVTITCRASQGIYSWLAWYQQKPGKAPNLLIYTASTLQSGVPSRFSGSGSGTDFTLTISSLQPEDFATYYCQQANIFPLTFGGGTKVEIKRTVAAPSVFIFPPSDEQLKSGTASVVCLLNNFYPREAKVQWKVDNALQSGNSQESVTEQDSKDSTYSLSSTLTLSKADYEKHKVYACEVTHQGLSSPVTKSFNRGECGGGGSGGGGSEVQLVESGGGLVQPGGSLRLSCAASGFTFTDYTMDWVRQAPGKGLEWVADVNPNSGGSIYNQRFKGRFTLSVDRSKNTLYLQMNSLRAEDTAVYYCARNLGPSFYFDYWGQGTLVTVSSGGGGSGGGGSGGGGSGGGGSDIQMTQSPSSLSASVGDRVTITCKASQDVSIGVAWYQQKPGKAPKLLIYSASYRYTGVPSRFSGSGSGTDFTLTISSLQPEDFATYYCQQYYIYPYTFGQGTKVEIK

SEQ ID NO: 767 - protein, 470 aa, Artificial Sequence
  Description of Artificial Sequence: Synthetic polypeptide
EIVLTQSPATLSLSPGERATLSCRASQSVSSYLAWYQQKPGQAPRLLIYDASNRATGIPARFSGSGSGTDFTLTISSLEPEDFAVYYCQQRRNWPLTFGGGTKVEIKRTVAAPSVFIFPPSDEQLKSGTASVVCLLNNFYPREAKVQWKVDNALQSGNSQESVTEQDSKDSTYSLSSTLTLSKADYEKHKVYACEVTHQGLSSPVTKSFNRGECGGGGSGGGGSEVQLVESGGGLVQPGGSLRLSCAASGFTFTDYTMDWVRQAPGKGLEWVADVNPNSGGSIYNQRFKGRFTLSVDRSKNTLYLQMNSLRAEDTAVYYCARNLGPSFYFDYWGQGTLVTVSSGGGGSGGGGSGGGGSGGGGSDIQMTQSPSSLSASVGDRVTITCKASQDVSIGVAWYQQKPGKAPKLLIYSASYRYTGVPSRFSGSGSGTDFTLTISSLQPEDFATYYCQQYYIYPYTFGQGTKVEIK

SEQ ID NO: 768 - protein, 469 aa, Artificial Sequence
  Description of Artificial Sequence: Synthetic polypeptide
DIQMTQSPSSLSASVGDRVTITCKASQDVSIGVAWYQQKPGKAPKLLIYSASYRYTGVPSRFSGSGSGTDFTLTISSLQPEDFATYYCQQYYIYPYTFGQGTKVEIKRTVAAPSVFIFPPSDEQLKSGTASVVCLLNNFYPREAKVQWKVDNALQSGNSQESVTEQDSKDSTYSLSSTLTLSKADYEKHKVYACEVTHQGLSSPVTKSFNRGECGGGGSGGGGSQVQLVESGGGVVQPGRSLRLSCAASGFTFSNYGMYWVRQAPGKGLEWVAVIWYDGSNKYYADSVKGRFTISRDNSKNTLYLQMNSLRAEDTAVYYCARDLWGWYFDYWGQGTLVTVSSGGGGSGGGGSGGGGSGGGGSEIVLTQSPATLSLSPGERATLSCRASQSVSSYLAWYQQKPGQAPRLLIYDASNRATGIPARFSGSGSGTDFTLTISSLEPEDFAVYYCQQRRNWPLTFGGGTKVEIK

SEQ ID NO: 769 - protein, 474 aa, Artificial Sequence
  Description of Artificial Sequence: Synthetic polypeptide
DIQMTQSPSSVSASVGDRVTITCRASQGIYSWLAWYQQKPGKAPNLLIYTASTLQSGVPSRFSGSGSGTDFTLTISSLQPEDFATYYCQQANIFPLTFGGGTKVEIKRTVAAPSVFIFPPSDEQLKSGTASVVCLLNNFYPREAKVQWKVDNALQSGNSQESVTEQDSKDSTYSLSSTLTLSKADYEKHKVYACEVTHQGLSSPVTKSFNRGECGGGGSGGGGSQVQLVQSGPEVKKPGASVKVSCKASGYTFTDYAVHWVRQAPGKRLEWIGVISTYNDYTYNNQDFKGRVTMTRDTSASTAYMELSRLRSEDTAVYYCARGNSYFYALDYWGQGTSVTVSSGGGGSGGGGSGGGGSGGGGSEIVLTQSPATLSLSPGERATLSCRASESVDSYGKSFMHWYQQKPGQAPRLLIYRASNLESGIPARFSGSGSGTDFTLTISSLEPEDFAVYYCQQSNEDPWTFGGGTKLEIK

SEQ ID NO: 770 - protein, 474 aa, Artificial Sequence
  Description of Artificial Sequence: Synthetic polypeptide
EIVLTQSPATLSLSPGERATLSCRASQSVSSYLAWYQQKPGQAPRLLIYDASNRATGIPARFSGSGSGTDFTLTISSLEPEDFAVYYCQQRRNWPLTFGGGTKVEIKRTVAAPSVFIFPPSDEQLKSGTASVVCLLNNFYPREAKVQWKVDNALQSGNSQESVTEQDSKDSTYSLSSTLTLSKADYEKHKVYACEVTHQGLSSPVTKSFNRGECGGGGSGGGGSQVQLVQSGPEVKKPGASVKVSCKASGYTFTDYAVHWVRQAPGKRLEWIGVISTYNDYTYNNQDFKGRVTMTRDTSASTAYMELSRLRSEDTAVYYCARGNSYFYALDYWGQGTSVTVSSGGGGSGGGGSGGGGSGGGGSEIVLTQSPATLSLSPGERATLSCRASESVDSYGKSFMHWYQQKPGQAPRLLIYRASNLESGIPARFSGSGSGTDFTLTISSLEPEDFAVYYCQQSNEDPWTFGGGTKLEIK

SEQ ID NO: 771 - protein, 473 aa, Artificial Sequence
  Description of Artificial Sequence: Synthetic polypeptide
EIVLTQSPATLSLSPGERATLSCRASESVDSYGKSFMHWYQQKPGQAPRLLIYRASNLESGIPARFSGSGSGTDFTLTISSLEPEDFAVYYCQQSNEDPWTFGGGTKLEIKRTVAAPSVFIFPPSDEQLKSGTASVVCLLNNFYPREAKVQWKVDNALQSGNSQESVTEQDSKDSTYSLSSTLTLSKADYEKHKVYACEVTHQGLSSPVTKSFNRGECGGGGSGGGGSQVQLVESGGGVVQPGRSLRLSCAASGFTFSNYGMYWVRQAPGKGLEWVAVIWYDGSNKYYADSVKGRFTISRDNSKNTLYLQMNSLRAEDTAVYYCARDLWGWYFDYWGQGTLVTVSSGGGGSGGGGSGGGGSGGGGSEIVLTQSPATLSLSPGERATLSCRASQSVSSYLAWYQQKPGQAPRLLIYDASNRATGIPARFSGSGSGTDFTLTISSLEPEDFAVYYCQQRRNWPLTFGGGTKVEIK

SEQ ID NO: 772 - protein, 473 aa, Artificial Sequence
  Description of Artificial Sequence: Synthetic polypeptide
DIQMTQSPSSVSASVGDRVTITCRASQGIYSWLAWYQQKPGKAPNLLIYTASTLQSGVPSRFSGSGSGTDFTLTISSLQPEDFATYYCQQANIFPLTFGGGTKVEIKRTVAAPSVFIFPPSDEQLKSGTASVVCLLNNFYPREAKVQWKVDNALQSGNSQESVTEQDSKDSTYSLSSTLTLSKADYEKHKVYACEVTHQGLSSPVTKSFNRGECGGGGSGGGGSQVKLQQSGPELKKPGETVKISCKASGYTFTEFGMNWVKQAPGKGLKWMGWINTKTGEATYVEEFKGRFAFSLETSATTAYLQINNLKNEDTAKYFCARWDFYDYVEAMDYWGQGTTVTVSSGGGGSGGGGSGGGGSGGGGSDIVMTQSQRFMSTSVGDRVSVTCKASQNVGTNVAWYQQKPGQSPKALIYSASYRYSGVPDRFTGSGSGTDFTLTISNVQSEDLAEYFCHQYYTYPLFTFGSGTKLEMK

SEQ ID NO: 773 - protein, 473 aa, Artificial Sequence
  Description of Artificial Sequence: Synthetic polypeptide
EIVLTQSPATLSLSPGERATLSCRASQSVSSYLAWYQQKPGQAPRLLIYDASNRATGIPARFSGSGSGTDFTLTISSLEPEDFAVYYCQQRRNWPLTFGGGTKVEIKRTVAAPSVFIFPPSDEQLKSGTASVVCLLNNFYPREAKVQWKVDNALQSGNSQESVTEQDSKDSTYSLSSTLTLSKADYEKHKVYACEVTHQGLSSPVTKSFNRGECGGGGSGGGGSQVKLQQSGPELKKPGETVKISCKASGYTFTEFGMNWVKQAPGKGLKWMGWINTKTGEATYVEEFKGRFAFSLETSATTAYLQINNLKNEDTAKYFCARWDFYDYVEAMDYWGQGTTVTVSSGGGGSGGGGSGGGGSGGGGSDIVMTQSQRFMSTSVGDRVSVTCKASQNVGTNVAWYQQKPGQSPKALIYSASYRYSGVPDRFTGSGSGTDFTLTISNVQSEDLAEYFCHQYYTYPLFTFGSGTKLEMK

SEQ ID NO: 774 - protein, 470 aa, Artificial Sequence
  Description of Artificial Sequence: Synthetic polypeptide
DIVMTQSQRFMSTSVGDRVSVTCKASQNVGTNVAWYQQKPGQSPKALIYSASYRYSGVPDRFTGSGSGTDFTLTISNVQSEDLAEYFCHQYYTYPLFTFGSGTKLEMKRTVAAPSVFIFPPSDEQLKSGTASVVCLLNNFYPREAKVQWKVDNALQSGNSQESVTEQDSKDSTYSLSSTLTLSKADYEKHKVYACEVTHQGLSSPVTKSFNRGECGGGGSGGGGSQVQLVESGGGVVQPGRSLRLSCAASGFTFSNYGMYWVRQAPGKGLEWVAVIWYDGSNKYYADSVKGRFTISRDNSKNTLYLQMNSLRAEDTAVYYCARDLWGWYFDYWGQGTLVTVSSGGGGSGGGGSGGGGSGGGGSEIVLTQSPATLSLSPGERATLSCRASQSVSSYLAWYQQKPGQAPRLLIYDASNRATGIPARFSGSGSGTDFTLTISSLEPEDFAVYYCQQRRNWPLTFGGGTKVEIK

SEQ ID NO: 775 - protein, 471 aa, Artificial Sequence
  Description of Artificial Sequence: Synthetic polypeptide
DIQMTQSPSSVSASVGDRVTITCRASQGIYSWLAWYQQKPGKAPNLLIYTASTLQSGVPSRFSGSGSGTDFTLTISSLQPEDFATYYCQQANIFPLTFGGGTKVEIKRTVAAPSVFIFPPSDEQLKSGTASVVCLLNNFYPREAKVQWKVDNALQSGNSQESVTEQDSKDSTYSLSSTLTLSKADYEKHKVYACEVTHQGLSSPVTKSFNRGECGGGGSGGGGSEVQLVESGPALVKPTQTLTLTCTVSGFSLTGYSVNWIRQPPGKALEWLGMIWGDGSTDYNSALKSRLTISKDTSKNQVVLTMTNMDPVDTATYYCARDYYFNYASWFAYWGQGTLVTVSSGGGGSGGGGSGGGGSGGGGSDIQMTQSPSSLSASVGDRVTITCSASQGISNYLNWYQQKPGKTVKLLIYYTSNLHSGVPSRFSGSGSGTDYTLTISSLQPEDFATYYCQQYSELPWTFGQGTKVEIK

SEQ ID NO: 776 - protein, 471 aa, Artificial Sequence
  Description of Artificial Sequence: Synthetic polypeptide
EIVLTQSPATLSLSPGERATLSCRASQSVSSYLAWYQQKPGQAPRLLIYDASNRATGIPARFSGSGSGTDFTLTISSLEPEDFAVYYCQQRRNWPLTFGGGTKVEIKRTVAAPSVFIFPPSDEQLKSGTASVVCLLNNFYPREAKVQWKVDNALQSGNSQESVTEQDSKDSTYSLSSTLTLSKADYEKHKVYACEVTHQGLSSPVTKSFNRGECGGGGSGGGGSEVQLVESGPALVKPTQTLTLTCTVSGFSLTGYSVNWIRQPPGKALEWLGMIWGDGSTDYNSALKSRLTISKDTSKNQVVLTMTNMDPVDTATYYCARDYYFNYASWFAYWGQGTLVTVSSGGGGSGGGGSGGGGSGGGGSDIQMTQSPSSLSASVGDRVTITCSASQGISNYLNWYQQKPGKTVKLLIYYTSNLHSGVPSRFSGSGSGTDYTLTISSLQPEDFATYYCQQYSELPWTFGQGTKVEIK

SEQ ID NO: 777 - protein, 469 aa, Artificial Sequence
  Description of Artificial Sequence: Synthetic polypeptide
DIQMTQSPSSLSASVGDRVTITCSASQGISNYLNWYQQKPGKTVKLLIYYTSNLHSGVPSRFSGSGSGTDYTLTISSLQPEDFATYYCQQYSELPWTFGQGTKVEIKRTVAAPSVFIFPPSDEQLKSGTASVVCLLNNFYPREAKVQWKVDNALQSGNSQESVTEQDSKDSTYSLSSTLTLSKADYEKHKVYACEVTHQGLSSPVTKSFNRGECGGGGSGGGGSQVQLVESGGGVVQPGRSLRLSCAASGFTFSNYGMYWVRQAPGKGLEWVAVIWYDGSNKYYADSVKGRFTISRDNSKNTLYLQMNSLRAEDTAVYYCARDLWGWYFDYWGQGTLVTVSSGGGGSGGGGSGGGGSGGGGSEIVLTQSPATLSLSPGERATLSCRASQSVSSYLAWYQQKPGQAPRLLIYDASNRATGIPARFSGSGSGTDFTLTISSLEPEDFAVYYCQQRRNWPLTFGGGTKVEIK

SEQ ID NO: 778 - protein, 469 aa, Artificial Sequence
  Description of Artificial Sequence: Synthetic polypeptide
DIQMTQSPSSVSASVGDRVTITCRASQGIYSWLAWYQQKPGKAPNLLIYTASTLQSGVPSRFSGSGSGTDFTLTISSLQPEDFATYYCQQANIFPLTFGGGTKVEIKRTVAAPSVFIFPPSDEQLKSGTASVVCLLNNFYPREAKVQWKVDNALQSGNSQESVTEQDSKDSTYSLSSTLTLSKADYEKHKVYACEVTHQGLSSPVTKSFNRGECGGGGSGGGGSQVQLVQSGAEVKKPGASVKVSCKASGYTFTNYGMNWVRQAPGQGLEWMGWINTYTGEPTYADDFKGRVTMTTDTSTSTAYMELRSLRSDDTAVYYCARIGDSSPSDYWGQGTLVTVSSGGGGSGGGGSGGGGSGGGGSEIVMTQSPATLSVSPGERATLSCKASQSVSNDVVWYQQKPGQAPRLLIYYASNRYTGIPARFSGSGSGTEFTLTISSLQSEDFAVYYCQQDYTSPWTFGQGTKLEIK

SEQ ID NO: 779 - protein, 469 aa, Artificial Sequence
  Description of Artificial Sequence: Synthetic polypeptide
EIVLTQSPATLSLSPGERATLSCRASQSVSSYLAWYQQKPGQAPRLLIYDASNRATGIPARFSGSGSGTDFTLTISSLEPEDFAVYYCQQRRNWPLTFGGGTKVEIKRTVAAPSVFIFPPSDEQLKSGTASVVCLLNNFYPREAKVQWKVDNALQSGNSQESVTEQDSKDSTYSLSSTLTLSKADYEKHKVYACEVTHQGLSSPVTKSFNRGECGGGGSGGGGSQVQLVQSGAEVKKPGASVKVSCKASGYTFTNYGMNWVRQAPGQGLEWMGWINTYTGEPTYADDFKGRVTMTTDTSTSTAYMELRSLRSDDTAVYYCARIGDSSPSDYWGQGTLVTVSSGGGGSGGGGSGGGGSGGGGSEIVMTQSPATLSVSPGERATLSCKASQSVSNDVVWYQQKPGQAPRLLIYYASNRYTGIPARFSGSGSGTEFTLTISSLQSEDFAVYYCQQDYTSPWTFGQGTKLEIK

SEQ ID NO: 780 - protein, 469 aa, Artificial Sequence
  Description of Artificial Sequence: Synthetic polypeptide
EIVMTQSPATLSVSPGERATLSCKASQSVSNDVVWYQQKPGQAPRLLIYYASNRYTGIPARFSGSGSGTEFTLTISSLQSEDFAVYYCQQDYTSPWTFGQGTKLEIKRTVAAPSVFIFPPSDEQLKSGTASVVCLLNNFYPREAKVQWKVDNALQSGNSQESVTEQDSKDSTYSLSSTLTLSKADYEKHKVYACEVTHQGLSSPVTKSFNRGECGGGGSGGGGSQVQLVESGGGVVQPGRSLRLSCAASGFTFSNYGMYWVRQAPGKGLEWVAVIWYDGSNKYYADSVKGRFTISRDNSKNTLYLQMNSLRAEDTAVYYCARDLWGWYFDYWGQGTLVTVSSGGGGSGGGGSGGGGSGGGGSEIVLTQSPATLSLSPGERATLSCRASQSVSSYLAWYQQKPGQAPRLLIYDASNRATGIPARFSGSGSGTDFTLTISSLEPEDFAVYYCQQRRNWPLTFGGGTKVEIK

SEQ ID NO: 781 - protein, 472 aa, Artificial Sequence
  Description of Artificial Sequence: Synthetic polypeptide
DIQMTQSPSSVSASVGDRVTITCRASQGIYSWLAWYQQKPGKAPNLLIYTASTLQSGVPSRFSGSGSGTDFTLTISSLQPEDFATYYCQQANIFPLTFGGGTKVEIKRTVAAPSVFIFPPSDEQLKSGTASVVCLLNNFYPREAKVQWKVDNALQSGNSQESVTEQDSKDSTYSLSSTLTLSKADYEKHKVYACEVTHQGLSSPVTKSFNRGECGGGGSGGGGSQVQLQQSGSELKKPGASVKVSCKASGYTFTNYGMNWVKQAPGQGLKWMGWINTYTGEPTYTDDFKGRFAFSLDTSVSTAYLQISSLKADDTAVYFCARGGFGSSYWYFDVWGQGSLVTVSSGGGGSGGGGSGGGGSGGGGSDIQLTQSPSSLSASVGDRVSITCKASQDVSIAVAWYQQKPGKAPKLLIYSASYRYTGVPDRFSGSGSGTDFTLTISSLQPEDFAVYYCQQHYITPLTFGAGTKVEIK

SEQ ID NO: 782 - protein, 472 aa, Artificial Sequence
  Description of Artificial Sequence: Synthetic polypeptide
EIVLTQSPATLSLSPGERATLSCRASQSVSSYLAWYQQKPGQAPRLLIYDASNRATGIPARFSGSGSGTDFTLTISSLEPEDFAVYYCQQRRNWPLTFGGGTKVEIKRTVAAPSVFIFPPSDEQLKSGTASVVCLLNNFYPREAKVQWKVDNALQSGNSQESVTEQDSKDSTYSLSSTLTLSKADYEKHKVYACEVTHQGLSSPVTKSFNRGECGGGGSGGGGSQVQLQQSGSELKKPGASVKVSCKASGYTFTNYGMNWVKQAPGQGLKWMGWINTYTGEPTYTDDFKGRFAFSLDTSVSTAYLQISSLKADDTAVYFCARGGFGSSYWYFDVWGQGSLVTVSSGGGGSGGGGSGGGGSGGGGSDIQLTQSPSSLSASVGDRVSITCKASQDVSIAVAWYQQKPGKAPKLLIYSASYRYTGVPDRFSGSGSGTDFTLTISSLQPEDFAVYYCQQHYITPLTFGAGTKVEIK

SEQ ID NO: 783 - protein, 469 aa, Artificial Sequence
  Description of Artificial Sequence: Synthetic polypeptide
DIQLTQSPSSLSASVGDRVSITCKASQDVSIAVAWYQQKPGKAPKLLIYSASYRYTGVPDRFSGSGSGTDFTLTISSLQPEDFAVYYCQQHYITPLTFGAGTKVEIKRTVAAPSVFIFPPSDEQLKSGTASVVCLLNNFYPREAKVQWKVDNALQSGNSQESVTEQDSKDSTYSLSSTLTLSKADYEKHKVYACEVTHQGLSSPVTKSFNRGECGGGGSGGGGSQVQLVESGGGVVQPGRSLRLSCAASGFTFSNYGMYWVRQAPGKGLEWVAVIWYDGSNKYYADSVKGRFTISRDNSKNTLYLQMNSLRAEDTAVYYCARDLWGWYFDYWGQGTLVTVSSGGGGSGGGGSGGGGSGGGGSEIVLTQSPATLSLSPGERATLSCRASQSVSSYLAWYQQKPGQAPRLLIYDASNRATGIPARFSGSGSGTDFTLTISSLEPEDFAVYYCQQRRNWPLTFGGGTKVEIK

SEQ ID NO: 784 - protein, 476 aa, Artificial Sequence
  Description of Artificial Sequence: Synthetic polypeptide
DIQMTQSPSSVSASVGDRVTITCRASQGIYSWLAWYQQKPGKAPNLLIYTASTLQSGVPSRFSGSGSGTDFTLTISSLQPEDFATYYCQQANIFPLTFGGGTKVEIKRTVAAPSVFIFPPSDEQLKSGTASVVCLLNNFYPREAKVQWKVDNALQSGNSQESVTEQDSKDSTYSLSSTLTLSKADYEKHKVYACEVTHQGLSSPVTKSFNRGECGGGGSGGGGSQVQLVQSGAEVKKPGASVKVSCKASGLTIEDYYMHWVRQAPGQGLEWMGWIDPENGDTEYGPKFQGRVTMTRDTSINTAYMELSRLRSDDTAVYYCAVHNAHYGTWFAYWGQGTLVTVSSGGGGSGGGGSGGGGSGGGGSDVVMTQSPLSLPVTLGQPASISCRSSQSLLHSSGNTYLEYFQQRPGQSPRPLIYKISTRFSGVPDRFSGSGSGTDFTLKISRVEAEDVGVYYCFQGSHVPYTFGGGTKVEIK

SEQ ID NO: 785 - protein, 476 aa, Artificial Sequence
  Description of Artificial Sequence: Synthetic polypeptide
EIVLTQSPATLSLSPGERATLSCRASQSVSSYLAWYQQKPGQAPRLLIYDASNRATGIPARFSGSGSGTDFTLTISSLEPEDFAVYYCQQRRNWPLTFGGGTKVEIKRTVAAPSVFIFPPSDEQLKSGTASVVCLLNNFYPREAKVQWKVDNALQSGNSQESVTEQDSKDSTYSLSSTLTLSKADYEKHKVYACEVTHQGLSSPVTKSFNRGECGGGGSGGGGSQVQLVQSGAEVKKPGASVKVSCKASGLTIEDYYMHWVRQAPGQGLEWMGWIDPENGDTEYGPKFQGRVTMTRDTSINTAYMELSRLRSDDTAVYYCAVHNAHYGTWFAYWGQGTLVTVSSGGGGSGGGGSGGGGSGGGGSDVVMTQSPLSLPVTLGQPASISCRSSQSLLHSSGNTYLEYFQQRPGQSPRPLIYKISTRFSGVPDRFSGSGSGTDFTLKISRVEAEDVGVYYCFQGSHVPYTFGGGTKVEIK

SEQ ID NO: 786 - protein, 474 aa, Artificial Sequence
  Description of Artificial Sequence: Synthetic polypeptide
DVVMTQSPLSLPVTLGQPASISCRSSQSLLHSSGNTYLEYFQQRPGQSPRPLIYKISTRFSGVPDRFSGSGSGTDFTLKISRVEAEDVGVYYCFQGSHVPYTFGGGTKVEIKRTVAAPSVFIFPPSDEQLKSGTASVVCLLNNFYPREAKVQWKVDNALQSGNSQESVTEQDSKDSTYSLSSTLTLSKADYEKHKVYACEVTHQGLSSPVTKSFNRGECGGGGSGGGGSQVQLVESGGGVVQPGRSLRLSCAASGFTFSNYGMYWVRQAPGKGLEWVAVIWYDGSNKYYADSVKGRFTISRDNSKNTLYLQMNSLRAEDTAVYYCARDLWGWYFDYWGQGTLVTVSSGGGGSGGGGSGGGGSGGGGSEIVLTQSPATLSLSPGERATLSCRASQSVSSYLAWYQQKPGQAPRLLIYDASNRATGIPARFSGSGSGTDFTLTISSLEPEDFAVYYCQQRRNWPLTFGGGTKVEIK

SEQ ID NO: 787 - protein, 481 aa, Artificial Sequence
  Description of Artificial Sequence: Synthetic polypeptide
DIQMTQSPSSVSASVGDRVTITCRASQGIYSWLAWYQQKPGKAPNLLIYTASTLQSGVPSRFSGSGSGTDFTLTISSLQPEDFATYYCQQANIFPLTFGGGTKVEIKRTVAAPSVFIFPPSDEQLKSGTASVVCLLNNFYPREAKVQWKVDNALQSGNSQESVTEQDSKDSTYSLSSTLTLSKADYEKHKVYACEVTHQGLSSPVTKSFNRGECGGGGSGGGGSQVQLVQSGAEVKKPGASVKVSCKTSRYTFTEYTIHWVRQAPGQRLEWIGGINPNNGIPNYNQKFKGRVTITVDTSASTAYMELSSLRSEDTAVYYCARRRIAYGYDEGHAMDYWGQGTLVTVSSGGGGSGGGGSGGGGSGGGGSDIVMTQSPDSLAVSLGERATINCKSSQSLLYSRNQKNYLAWYQQKPGQPPKLLIFWASTRESGVPDRFSGSGFGTDFTLTISSLQAEDVAVYYCQQYFSYPLTFGQGTKVEIK

SEQ ID NO: 788 - protein, 481 aa, Artificial Sequence
  Description of Artificial Sequence: Synthetic polypeptide
EIVLTQSPATLSLSPGERATLSCRASQSVSSYLAWYQQKPGQAPRLLIYDASNRATGIPARFSGSGSGTDFTLTISSLEPEDFAVYYCQQRRNWPLTFGGGTKVEIKRTVAAPSVFIFPPSDEQLKSGTASVVCLLNNFYPREAKVQWKVDNALQSGNSQESVTEQDSKDSTYSLSSTLTLSKADYEKHKVYACEVTHQGLSSPVTKSFNRGECGGGGSGGGGSQVQLVQSGAEVKKPGASVKVSCKTSRYTFTEYTIHWVRQAPGQRLEWIGGINPNNGIPNYNQKFKGRVTITVDTSASTAYMELSSLRSEDTAVYYCARRRIAYGYDEGHAMDYWGQGTLVTVSSGGGGSGGGGSGGGGSGGGGSDIVMTQSPDSLAVSLGERATINCKSSQSLLYSRNQKNYLAWYQQKPGQPPKLLIFWASTRESGVPDRFSGSGFGTDFTLTISSLQAEDVAVYYCQQYFSYPLTFGQGTKVEIK

SEQ ID NO: 789 - protein, 475 aa, Artificial Sequence
  Description of Artificial Sequence: Synthetic polypeptide
DIVMTQSPDSLAVSLGERATINCKSSQSLLYSRNQKNYLAWYQQKPGQPPKLLIFWASTRESGVPDRFSGSGFGTDFTLTISSLQAEDVAVYYCQQYFSYPLTFGQGTKVEIKRTVAAPSVFIFPPSDEQLKSGTASVVCLLNNFYPREAKVQWKVDNALQSGNSQESVTEQDSKDSTYSLSSTLTLSKADYEKHKVYACEVTHQGLSSPVTKSFNRGECGGGGSGGGGSQVQLVESGGGVVQPGRSLRLSCAASGFTFSNYGMYWVRQAPGKGLEWVAVIWYDGSNKYYADSVKGRFTISRDNSKNTLYLQMNSLRAEDTAVYYCARDLWGWYFDYWGQGTLVTVSSGGGGSGGGGSGGGGSGGGGSEIVLTQSPATLSLSPGERATLSCRASQSVSSYLAWYQQKPGQAPRLLIYDASNRATGIPARFSGSGSGTDFTLTISSLEPEDFAVYYCQQRRNWPLTFGGGTKVEIK

SEQ ID NO: 790 - protein, 467 aa, Artificial Sequence
  Description of Artificial Sequence: Synthetic polypeptide
DIQMTQSPSSVSASVGDRVTITCRASQGIYSWLAWYQQKPGKAPNLLIYTASTLQSGVPSRFSGSGSGTDFTLTISSLQPEDFATYYCQQANIFPLTFGGGTKVEIKRTVAAPSVFIFPPSDEQLKSGTASVVCLLNNFYPREAKVQWKVDNALQSGNSQESVTEQDSKDSTYSLSSTLTLSKADYEKHKVYACEVTHQGLSSPVTKSFNRGECGGGGSGGGGSEVQLVESGGGLVQPGGSLRLSCAASGYSITNDYAWNWVRQAPGKGLEWVGYISYSGYTTYNPSLKSRFTISRDTSKNTLYLQMNSLRAEDTAVYYCARWTSGLDYWGQGTLVTVSSGGGGSGGGGSGGGGSGGGGSDIQMTQSPSSLSASVGDRVTITCKASDLIHNWLAWYQQKPGKAPKLLIYGATSLETGVPSRFSGSGSGTDFTLTISSLQPEDFATYYCQQYWTTPFTFGQGTKVEIK

SEQ ID NO: 791 - protein, 467 aa, Artificial Sequence
  Description of Artificial Sequence: Synthetic polypeptide
EIVLTQSPATLSLSPGERATLSCRASQSVSSYLAWYQQKPGQAPRLLIYDASNRATGIPARFSGSGSGTDFTLTISSLEPEDFAVYYCQQRRNWPLTFGGGTKVEIKRTVAAPSVFIFPPSDEQLKSGTASVVCLLNNFYPREAKVQWKVDNALQSGNSQESVTEQDSKDSTYSLSSTLTLSKADYEKHKVYACEVTHQGLSSPVTKSFNRGECGGGGSGGGGSEVQLVESGGGLVQPGGSLRLSCAASGYSITNDYAWNWVRQAPGKGLEWVGYISYSGYTTYNPSLKSRFTISRDTSKNTLYLQMNSLRAEDTAVYYCARWTSGLDYWGQGTLVTVSSGGGGSGGGGSGGGGSGGGGSDIQMTQSPSSLSASVGDRVTITCKASDLIHNWLAWYQQKPGKAPKLLIYGATSLETGVPSRFSGSGSGTDFTLTISSLQPEDFATYYCQQYWTTPFTFGQGTKVEIK

SEQ ID NO: 792 - protein, 469 aa, Artificial Sequence
  Description of Artificial Sequence: Synthetic polypeptide
DIQMTQSPSSLSASVGDRVTITCKASDLIHNWLAWYQQKPGKAPKLLIYGATSLETGVPSRFSGSGSGTDFTLTISSLQPEDFATYYCQQYWTTPFTFGQGTKVEIKRTVAAPSVFIFPPSDEQLKSGTASVVCLLNNFYPREAKVQWKVDNALQSGNSQESVTEQDSKDSTYSLSSTLTLSKADYEKHKVYACEVTHQGLSSPVTKSFNRGECGGGGSGGGGSQVQLVESGGGVVQPGRSLRLSCAASGFTFSNYGMYWVRQAPGKGLEWVAVIWYDGSNKYYADSVKGRFTISRDNSKNTLYLQMNSLRAEDTAVYYCARDLWGWYFDYWGQGTLVTVSSGGGGSGGGGSGGGGSGGGGSEIVLTQSPATLSLSPGERATLSCRASQSVSSYLAWYQQKPGQAPRLLIYDASNRATGIPARFSGSGSGTDFTLTISSLEPEDFAVYYCQQRRNWPLTFGGGTKVEIK

SEQ ID NO: 793 - protein, 471 aa, Artificial Sequence
  Description of Artificial Sequence: Synthetic polypeptide
DIQMTQSPSSVSASVGDRVTITCRASQGIYSWLAWYQQKPGKAPNLLIYTASTLQSGVPSRFSGSGSGTDFTLTISSLQPEDFATYYCQQANIFPLTFGGGTKVEIKRTVAAPSVFIFPPSDEQLKSGTASVVCLLNNFYPREAKVQWKVDNALQSGNSQESVTEQDSKDSTYSLSSTLTLSKADYEKHKVYACEVTHQGLSSPVTKSFNRGECGGGGSGGGGSEVQLVESGGGLVQPGGSLRLSCAASGFNIKDTYIHWVRQAPGKGLEWVARIYPTNGYTRYADSVKGRFTISADTSKNTAYLQMNSLRAEDTAVYYCSRWGGDGFYAMDYWGQGTLVTVSSGGGGSGGGGSGGGGSGGGGSDIQMTQSPSSLSASVGDRVTITCRASQDVNTAVAWYQQKPGKAPKLLIYSASFLYSGVPSRFSGSRSGTDFTLTISSLQPEDFATYYCQQHYTTPPTFGQGTKVEIK

SEQ ID NO: 794 - protein, 471 aa, Artificial Sequence
  Description of Artificial Sequence: Synthetic polypeptide
EIVLTQSPATLSLSPGERATLSCRASQSVSSYLAWYQQKPGQAPRLLIYDASNRATGIPARFSGSGSGTDFTLTISSLEPEDFAVYYCQQRRNWPLTFGGGTKVEIKRTVAAPSVFIFPPSDEQLKSGTASVVCLLNNFYPREAKVQWKVDNALQSGNSQESVTEQDSKDSTYSLSSTLTLSKADYEKHKVYACEVTHQGLSSPVTKSFNRGECGGGGSGGGGSEVQLVESGGGLVQPGGSLRLSCAASGFNIKDTYIHWVRQAPGKGLEWVARIYPTNGYTRYADSVKGRFTISADTSKNTAYLQMNSLRAEDTAVYYCSRWGGDGFYAMDYWGQGTLVTVSSGGGGSGGGGSGGGGSGGGGSDIQMTQSPSSLSASVGDRVTITCRASQDVNTAVAWYQQKPGKAPKLLIYSASFLYSGVPSRFSGSRSGTDFTLTISSLQPEDFATYYCQQHYTTPPTFGQGTKVEIK

SEQ ID NO: 795 - protein, 469 aa, Artificial Sequence
  Description of Artificial Sequence: Synthetic polypeptide
DIQMTQSPSSLSASVGDRVTITCRASQDVNTAVAWYQQKPGKAPKLLIYSASFLYSGVPSRFSGSRSGTDFTLTISSLQPEDFATYYCQQHYTTPPTFGQGTKVEIKRTVAAPSVFIFPPSDEQLKSGTASVVCLLNNFYPREAKVQWKVDNALQSGNSQESVTEQDSKDSTYSLSSTLTLSKADYEKHKVYACEVTHQGLSSPVTKSFNRGECGGGGSGGGGSQVQLVESGGGVVQPGRSLRLSCAASGFTFSNYGMYWVRQAPGKGLEWVAVIWYDGSNKYYADSVKGRFTISRDNSKNTLYLQMNSLRAEDTAVYYCARDLWGWYFDYWGQGTLVTVSSGGGGSGGGGSGGGGSGGGGSEIVLTQSPATLSLSPGERATLSCRASQSVSSYLAWYQQKPGQAPRLLIYDASNRATGIPARFSGSGSGTDFTLTISSLEPEDFAVYYCQQRRNWPLTFGGGTKVEIK

SEQ ID NO: 796 - protein, 717 aa, Artificial Sequence
  Description of Artificial Sequence: Synthetic polypeptide
QVQLVQSGAEVKKPGASVKVSCKASGYTFTGYYMHWVRQAPGQGLEWMGWINPDSGGTNYAQKFQGRVTMTRDTSISTAYMELNRLRSDDTAVYYCARDQPLGYCTNGVCSYFDYWGQGTLVTVSSASTKGPSVFPLAPSSKSTSGGTAALGCLVKDYFPEPVTVSWNSGALTSGVHTFPAVLQSSGLYSLSSVVTVPSSSLGTQTYICNVNHKPSNTKVDKKVEPKSCDKTHTCPPCPAPELLGGPSVFLFPPKPKDTLMISRTPEVTCVVVDVSHEDPEVKFNWYVDGVEVHNAKTKPREEQYNSTYRVVSVLTVLHQDWLNGKEYKCKVSNKALPAPIEKTISKAKGQPREPQVYTLPPSREEMTKNQVSLTCLVKGFYPSDIAVEWESNGQPENNYKTTPPVLDSDGSFFLYSKLTVDKSRWQQGNVFSCSVMHEALHNHYTQKSLSLSPGGGGGSGGGGSDIQMTQSPSSLSASVGDRVTITCRASQDVNTAVAWYQQKPGKAPKLLIYSASFLYSGVPSRFSGSRSGTDFTLTISSLQPEDFATYYCQQHYTTPPTFGQGTKVEIKGGGGSGGGGSGGGGSGGGGSGGGGSEVQLVESGGGLVQPGGSLRLSCAASGFNIKDTYIHWVRQAPGKGLEWVARIYPTNGYTRYADSVKGRFTISADTSKNTAYLQMNSLRAEDTAVYYCSRWGGDGFYAMDYWGQGTLVTVSS

SEQ ID NO: 797 - protein, 709 aa, Artificial Sequence
  Description of Artificial Sequence: Synthetic polypeptide
QVQLVESGGGVVQPGRSLRLSCAASGFTFSNYGMYWVRQAPGKGLEWVAVIWYDGSNKYYADSVKGRFTISRDNSKNTLYLQMNSLRAEDTAVYYCARDLWGWYFDYWGQGTLVTVSSASTKGPSVFPLAPSSKSTSGGTAALGCLVKDYFPEPVTVSWNSGALTSGVHTFPAVLQSSGLYSLSSVVTVPSSSLGTQTYICNVNHKPSNTKVDKKVEPKSCDKTHTCPPCPAPELLGGPSVFLFPPKPKDTLMISRTPEVTCVVVDVSHEDPEVKFNWYVDGVEVHNAKTKPREEQYNSTYRVVSVLTVLHQDWLNGKEYKCKVSNKALPAPIEKTISKAKGQPREPQVYTLPPSREEMTKNQVSLTCLVKGFYPSDIAVEWESNGQPENNYKTTPPVLDSDGSFFLYSKLTVDKSRWQQGNVFSCSVMHEALHNHYTQKSLSLSPGGGGGSGGGGSDIQMTQSPSSLSASVGDRVTITCRASQDVNTAVAWYQQKPGKAPKLLIYSASFLYSGVPSRFSGSRSGTDFTLTISSLQPEDFATYYCQQHYTTPPTFGQGTKVEIKGGGGSGGGGSGGGGSGGGGSGGGGSEVQLVESGGGLVQPGGSLRLSCAASGFNIKDTYIHWVRQAPGKGLEWVARIYPTNGYTRYADSVKGRFTISADTSKNTAYLQMNSLRAEDTAVYYCSRWGGDGFYAMDYWGQGTLVTVSS

SEQ ID NO: 798 - protein, 476 aa, Artificial Sequence
  Description of Artificial Sequence: Synthetic polypeptide
DIQMTQSPSSVSASVGDRVTITCRASQGIYSWLAWYQQKPGKAPNLLIYTASTLQSGVPSRFSGSGSGTDFTLTISSLQPEDFATYYCQQANIFPLTFGGGTKVEIKRTVAAPSVFIFPPSDEQLKSGTASVVCLLNNFYPREAKVQWKVDNALQSGNSQESVTEQDSKDSTYSLSSTLTLSKADYEKHKVYACEVTHQGLSSPVTKSFNRGECGGGGSGGGGSDIQMTQSPSSLSASVGDRVTITCRASQDVNTAVAWYQQKPGKAPKLLIYSASFLYSGVPSRFSGSRSGTDFTLTISSLQPEDFATYYCQQHYTTPPTFGQGTKVEIKGGGGSGGGGSGGGGSGGGGSGGGGSEVQLVESGGGLVQPGGSLRLSCAASGFNIKDTYIHWVRQAPGKGLEWVARIYPTNGYTRYADSVKGRFTISADTSKNTAYLQMNSLRAEDTAVYYCSRWGGDGFYAMDYWGQGTLVTVSS

SEQ ID NO: 799 - protein, 476 aa, Artificial Sequence
  Description of Artificial Sequence: Synthetic polypeptide
EIVLTQSPATLSLSPGERATLSCRASQSVSSYLAWYQQKPGQAPRLLIYDASNRATGIPARFSGSGSGTDFTLTISSLEPEDFAVYYCQQRRNWPLTFGGGTKVEIKRTVAAPSVFIFPPSDEQLKSGTASVVCLLNNFYPREAKVQWKVDNALQSGNSQESVTEQDSKDSTYSLSSTLTLSKADYEKHKVYACEVTHQGLSSPVTKSFNRGECGGGGSGGGGSDIQMTQSPSSLSASVGDRVTITCRASQDVNTAVAWYQQKPGKAPKLLIYSASFLYSGVPSRFSGSRSGTDFTLTISSLQPEDFATYYCQQHYTTPPTFGQGTKVEIKGGGGSGGGGSGGGGSGGGGSGGGGSEVQLVESGGGLVQPGGSLRLSCAASGFNIKDTYIHWVRQAPGKGLEWVARIYPTNGYTRYADSVKGRFTISADTSKNTAYLQMNSLRAEDTAVYYCSRWGGDGFYAMDYWGQGTLVTVSS

SEQ ID NO: 800 - protein, 469 aa, Artificial Sequence
  Description of Artificial Sequence: Synthetic polypeptide
DIQMTQSPSSVSASVGDRVTITCRASQGIYSWLAWYQQKPGKAPNLLIYTASTLQSGVPSRFSGSGSGTDFTLTISSLQPEDFATYYCQQANIFPLTFGGGTKVEIKRTVAAPSVFIFPPSDEQLKSGTASVVCLLNNFYPREAKVQWKVDNALQSGNSQESVTEQDSKDSTYSLSSTLTLSKADYEKHKVYACEVTHQGLSSPVTKSFNRGECGGGGSGGGGSQVQLVESGGGVVQPGRSLRLSCAASGFTFSNYGMYWVRQAPGKGLEWVAVIWYDGSNKYYADSVKGRFTISRDNSKNTLYLQMNSLRAEDTAVYYCARDLWGWYFDYWGQGTLVTVSSGGGGSGGGGSGGGGSGGGGSEIVLTQSPATLSLSPGERATLSCRASQSVSSYLAWYQQKPGQAPRLLIYDASNRATGIPARFSGSGSGTDFTLTISSLEPEDFAVYYCQQRRNWPLTFGGGTKVEIK

SEQ ID NO: 801 - protein, 467 aa, Artificial Sequence
  Description of Artificial Sequence: Synthetic polypeptide
DIQMTQSPSSVSASVGDRVTITCRASQGIYSWLAWYQQKPGKAPNLLIYTASTLQSGVPSRFSGSGSGTDFTLTISSLQPEDFATYYCQQANIFPLTFGGGTKVEIKRTVAAPSVFIFPPSDEQLKSGTASVVCLLNNFYPREAKVQWKVDNALQSGNSQESVTEQDSKDSTYSLSSTLTLSKADYEKHKVYACEVTHQGLSSPVTKSFNRGECGGGGSGGGGSEVQLVQSGAEVKKPGESLRISCKGSGDSFTTYWIGWVRQMPGKGLEWMGIIYPGDSDTIYSPSFQGQVTISADKSISTAYLQWSSLKASDTAMYYCTRGDRGVDYWGQGTLVTVSSGGGGSGGGGSGGGGSGGGGSDIQMTQSPSSLSASVGDRVTITCRASQGISRWLAWYQQKPEKAPKSLIYAASSLQSGVPSRFSGSGSGTDFTLTISGLQPEDFATYYCQQYNSYPRTFGQGTKVEIK

SEQ ID NO: 802 - protein, 476 aa, Artificial Sequence
  Description of Artificial Sequence: Synthetic polypeptide
DIQMTQSPSSVSASVGDRVTITCRASQGIYSWLAWYQQKPGKAPNLLIYTASTLQSGVPSRFSGSGSGTDFTLTISSLQPEDFATYYCQQANIFPLTFGGGTKVEIKRTVAAPSVFIFPPSDEQLKSGTASVVCLLNNFYPREAKVQWKVDNALQSGNSQESVTEQDSKDSTYSLSSTLTLSKADYEKHKVYACEVTHQGLSSPVTKSFNRGECGGGGSGGGGSQVQLVESGGGVVQPGRSLRLSCAASGFTFSTYGMHWVRQAPGKGLEWVAVIWDDGSYKYYGDSVKGRFTISRDNSKNTLYLQMNSLRAEDTAVYYCARDGITMVRGVMKDYFDYWGQGTLVTVSSGGGGSGGGGSGGGGSGGGGSAIQLTQSPSSLSASVGDRVTITCRASQDISSALVWYQQKPGKAPKLLIYDASSLESGVPSRFSGSESGTDFTLTISSLQPEDFATYYCQQFNSYPLTFGGGTKVEIK

SEQ ID NO: 803 - protein, 476 aa, Artificial Sequence
  Description of Artificial Sequence: Synthetic polypeptide
EIVLTQSPATLSLSPGERATLSCRASQSVSSYLAWYQQKPGQAPRLLIYDASNRATGIPARFSGSGSGTDFTLTISSLEPEDFAVYYCQQRRNWPLTFGGGTKVEIKRTVAAPSVFIFPPSDEQLKSGTASVVCLLNNFYPREAKVQWKVDNALQSGNSQESVTEQDSKDSTYSLSSTLTLSKADYEKHKVYACEVTHQGLSSPVTKSFNRGECGGGGSGGGGSQVQLVESGGGVVQPGRSLRLSCAASGFTFSTYGMHWVRQAPGKGLEWVAVIWDDGSYKYYGDSVKGRFTISRDNSKNTLYLQMNSLRAEDTAVYYCARDGITMVRGVMKDYFDYWGQGTLVTVSSGGGGSGGGGSGGGGSGGGGSAIQLTQSPSSLSASVGDRVTITCRASQDISSALVWYQQKPGKAPKLLIYDASSLESGVPSRFSGSESGTDFTLTISSLQPEDFATYYCQQFNSYPLTFGGGTKVEIK

SEQ ID NO: 804 - protein, 469 aa, Artificial Sequence
  Description of Artificial Sequence: Synthetic polypeptide
AIQLTQSPSSLSASVGDRVTITCRASQDISSALVWYQQKPGKAPKLLIYDASSLESGVPSRFSGSESGTDFTLTISSLQPEDFATYYCQQFNSYPLTFGGGTKVEIKRTVAAPSVFIFPPSDEQLKSGTASVVCLLNNFYPREAKVQWKVDNALQSGNSQESVTEQDSKDSTYSLSSTLTLSKADYEKHKVYACEVTHQGLSSPVTKSFNRGECGGGGSGGGGSQVQLVESGGGVVQPGRSLRLSCAASGFTFSNYGMYWVRQAPGKGLEWVAVIWYDGSNKYYADSVKGRFTISRDNSKNTLYLQMNSLRAEDTAVYYCARDLWGWYFDYWGQGTLVTVSSGGGGSGGGGSGGGGSGGGGSEIVLTQSPATLSLSPGERATLSCRASQSVSSYLAWYQQKPGQAPRLLIYDASNRATGIPARFSGSGSGTDFTLTISSLEPEDFAVYYCQQRRNWPLTFGGGTKVEIK

SEQ ID NO: 805 - protein, 8 aa, Artificial Sequence
  Description of Artificial Sequence: Synthetic peptide
GYTFTEFG

SEQ ID NO: 806 - protein, 8 aa, Artificial Sequence
  Description of Artificial Sequence: Synthetic peptide
INTKTGEA

SEQ ID NO: 807 - protein, 14 aa, Artificial Sequence
  Description of Artificial Sequence: Synthetic peptide
ARWDFAYYVEAMDY

SEQ ID NO: 808 - protein, 6 aa, Artificial Sequence
  Description of Artificial Sequence: Synthetic peptide
AAVGTY

SEQ ID NO: 809 - protein, 3 aa, Artificial Sequence
  Description of Artificial Sequence: Synthetic peptide
SAS

SEQ ID NO: 810 - protein, 10 aa, Artificial Sequence
  Description of Artificial Sequence: Synthetic peptide
HQYYTYPLFT

SEQ ID NO: 811 - protein, 121 aa, Artificial Sequence
  Description of Artificial Sequence: Synthetic polypeptide
QVQLVQSGAEVKKPGASVKVSCKASGYTFTEFGMNWVRQAPGQGLEWMGWINTKTGEATYVEEFKGRVTFTTDTSTSTAYMELRSLRSDDTAVYYCARWDFAYYVEAMDYWGQGTTVTVSS

SEQ ID NO: 812 - protein, 108 aa, Artificial Sequence
  Description of Artificial Sequence: Synthetic polypeptide
DIQMTQSPSSLSASVGDRVTITCKASAAVGTYVAWYQQKPGKAPKLLIYSASYRKRGVPSRFSGSGSGTDFTLTISSLQPEDFATYYCHQYYTYPLFTFGQGTKLEIK

SEQ ID NO: 813 - protein, 451 aa, Artificial Sequence
  Description of Artificial Sequence: Synthetic polypeptide
QVQLVQSGAEVKKPGASVKVSCKASGYTFTEFGMNWVRQAPGQGLEWMGWINTKTGEATYVEEFKGRVTFTTDTSTSTAYMELRSLRSDDTAVYYCARWDFAYYVEAMDYWGQGTTVTVSSASTKGPSVFPLAPSSKSTSGGTAALGCLVKDYFPEPVTVSWNSGALTSGVHTFPAVLQSSGLYSLSSVVTVPSSSLGTQTYICNVNHKPSNTKVDKKVEPKSCDKTHTCPPCPAPELLGGPSVFLFPPKPKDTLMISRTPEVTCVVVDVSHEDPEVKFNWYVDGVEVHNAKTKPREEQYNSTYRVVSVLTVLHQDWLNGKEYKCKVSNKALPAPIEKTISKAKGQPREPQVYTLPPSREEMTKNQVSLTCLVKGFYPSDIAVEWESNGQPENNYKTTPPVLDSDGSFFLYSKLTVDKSRWQQGNVFSCSVMHEALHNHYTQKSLSLSPGK

SEQ ID NO: 814 - protein, 215 aa, Artificial Sequence
  Description of Artificial Sequence: Synthetic polypeptide
DIQMTQSPSSLSASVGDRVTITCKASAAVGTYVAWYQQKPGKAPKLLIYSASYRKRGVPSRFSGSGSGTDFTLTISSLQPEDFATYYCHQYYTYPLFTFGQGTKLEIKRTVAAPSVFIFPPSDEQLKSGTASVVCLLNNFYPREAKVQWKVDNALQSGNSQESVTEQDSKDSTYSLSSTLTLSKADYEKHKVYACEVTHQGLSSPVTKSFNRGEC

SEQ ID NO: 815 - protein, 714 aa, Artificial Sequence
  Description of Artificial Sequence: Synthetic polypeptide
QVQLVQSGAEVKKPGASVKVSCKASGYTFTGYYMHWVRQAPGQGLEWMGWINPDSGGTNYAQKFQGRVTMTRDTSISTAYMELNRLRSDDTAVYYCARDQPLGYCTNGVCSYFDYWGQGTLVTVSSASTKGPSVFPLAPSSKSTSGGTAALGCLVKDYFPEPVTVSWNSGALTSGVHTFPAVLQSSGLYSLSSVVTVPSSSLGTQTYICNVNHKPSNTKVDKKVEPKSCDKTHTCPPCPAPELLGGPSVFLFPPKPKDTLMISRTPEVTCVVVDVSHEDPEVKFNWYVDGVEVHNAKTKPREEQYNSTYRVVSVLTVLHQDWLNGKEYKCKVSNKALPAPIEKTISKAKGQPREPQVYTLPPSREEMTKNQVSLTCLVKGFYPSDIAVEWESNGQPENNYKTTPPVLDSDGSFFLYSKLTVDKSRWQQGNVFSCSVMHEALHNHYTQKSLSLSPGGGGGSGGGGSQVQLVQSGAEVKKPGASVKVSCKASGYTFTEFGMNWVRQAPGQGLEWMGWINTKTGEATYVEEFKGRVTFTTDTSTSTAYMELRSLRSDDTAVYYCARWDFAYYVEAMDYWGQGTTVTVSSGGGGSGGGGSGGGGSGGGGSDIQMTQSPSSLSASVGDRVTITCKASAAVGTYVAWYQQKPGKAPKLLIYSASYRKRGVPSRFSGSGSGTDFTLTISSLQPEDFATYYCHQYYTYPLFTFGQGTKLEIK

SEQ ID NO: 816 - protein, 713 aa, Artificial Sequence
  Description of Artificial Sequence: Synthetic polypeptide
QVQLVQSGAEVKKPGASVKVSCKASGYTFTEFGMNWVRQAPGQGLEWMGWINTKTGEATYVEEFKGRVTFTTDTSTSTAYMELRSLRSDDTAVYYCARWDFAYYVEAMDYWGQGTTVTVSSASTKGPSVFPLAPSSKSTSGGTAALGCLVKDYFPEPVTVSWNSGALTSGVHTFPAVLQSSGLYSLSSVVTVPSSSLGTQTYICNVNHKPSNTKVDKKVEPKSCDKTHTCPPCPAPELLGGPSVFLFPPKPKDTLMISRTPEVTCVVVDVSHEDPEVKFNWYVDGVEVHNAKTKPREEQYNSTYRVVSVLTVLHQDWLNGKEYKCKVSNKALPAPIEKTISKAKGQPREPQVYTLPPSREEMTKNQVSLTCLVKGFYPSDIAVEWESNGQPENNYKTTPPVLDSDGSFFLYSKLTVDKSRWQQGNVFSCSVMHEALHNHYTQKSLSLSPGGGGGSGGGGSQVQLVQSGAEVKKPGASVKVSCKASGYTFTGYYMHWVRQAPGQGLEWMGWINPDSGGTNYAQKFQGRVTMTRDTSISTAYMELNRLRSDDTAVYYCARDQPLGYCTNGVCSYFDYWGQGTLVTVSSGGGGSGGGGSGGGGSGGGGSDIQMTQSPSSVSASVGDRVTITCRASQGIYSWLAWYQQKPGKAPNLLIYTASTLQSGVPSRFSGSGSGTDFTLTISSLQPEDFATYYCQQANIFPLTFGGGTKVEIK

SEQ ID NO: 817 - protein, 478 aa, Artificial Sequence
  Description of Artificial Sequence: Synthetic polypeptide
DIQMTQSPSSLSASVGDRVTITCKASAAVGTYVAWYQQKPGKAPKLLIYSASYRKRGVPSRFSGSGSGTDFTLTISSLQPEDFATYYCHQYYTYPLFTFGQGTKLEIKRTVAAPSVFIFPPSDEQLKSGTASVVCLLNNFYPREAKVQWKVDNALQSGNSQESVTEQDSKDSTYSLSSTLTLSKADYEKHKVYACEVTHQGLSSPVTKSFNRGECGGGGSGGGGSQVQLVQSGAEVKKPGASVKVSCKASGYTFTGYYMHWVRQAPGQGLEWMGWINPDSGGTNYAQKFQGRVTMTRDTSISTAYMELNRLRSDDTAVYYCARDQPLGYCTNGVCSYFDYWGQGTLVTVSSGGGGSGGGGSGGGGSGGGGSDIQMTQSPSSVSASVGDRVTITCRASQGIYSWLAWYQQKPGKAPNLLIYTASTLQSGVPSRFSGSGSGTDFTLTISSLQPEDFATYYCQQANIFPLTFGGGTKVEIK

SEQ ID NO: 818 - protein, 706 aa, Artificial Sequence
  Description of Artificial Sequence: Synthetic polypeptide
QVQLVESGGGVVQPGRSLRLSCAASGFTFSNYGMYWVRQAPGKGLEWVAVIWYDGSNKYYADSVKGRFTISRDNSKNTLYLQMNSLRAEDTAVYYCARDLWGWYFDYWGQGTLVTVSSASTKGPSVFPLAPSSKSTSGGTAALGCLVKDYFPEPVTVSWNSGALTSGVHTFPAVLQSSGLYSLSSVVTVPSSSLGTQTYICNVNHKPSNTKVDKKVEPKSCDKTHTCPPCPAPELLGGPSVFLFPPKPKDTLMISRTPEVTCVVVDVSHEDPEVKFNWYVDGVEVHNAKTKPREEQYNSTYRVVSVLTVLHQDWLNGKEYKCKVSNKALPAPIEKTISKAKGQPREPQVYTLPPSREEMTKNQVSLTCLVKGFYPSDIAVEWESNGQPENNYKTTPPVLDSDGSFFLYSKLTVDKSRWQQGNVFSCSVMHEALHNHYTQKSLSLSPGGGGGSGGGGSQVQLVQSGAEVKKPGASVKVSCKASGYTFTEFGMNWVRQAPGQGLEWMGWINTKTGEATYVEEFKGRVTFTTDTSTSTAYMELRSLRSDDTAVYYCARWDFAYYVEAMDYWGQGTTVTVSSGGGGSGGGGSGGGGSGGGGSDIQMTQSPSSLSASVGDRVTITCKASAAVGTYVAWYQQKPGKAPKLLIYSASYRKRGVPSRFSGSGSGTDFTLTISSLQPEDFATYYCHQYYTYPLFTFGQGTKLEIK

SEQ ID NO: 819 - protein, 705 aa, Artificial Sequence
  Description of Artificial Sequence: Synthetic polypeptide
QVQLVQSGAEVKKPGASVKVSCKASGYTFTEFGMNWVRQAPGQGLEWMGWINTKTGEATYVEEFKGRVTFTTDTSTSTAYMELRSLRSDDTAVYYCARWDFAYYVEAMDYWGQGTTVTVSSASTKGPSVFPLAPSSKSTSGGTAALGCLVKDYFPEPVTVSWNSGALTSGVHTFPAVLQSSGLYSLSSVVTVPSSSLGTQTYICNVNHKPSNTKVDKKVEPKSCDKTHTCPPCPAPELLGGPSVFLFPPKPKDTLMISRTPEVTCVVVDVSHEDPEVKFNWYVDGVEVHNAKTKPREEQYNSTYRVVSVLTVLHQDWLNGKEYKCKVSNKALPAPIEKTISKAKGQPREPQVYTLPPSREEMTKNQVSLTCLVKGFYPSDIAVEWESNGQPENNYKTTPPVLDSDGSFFLYSKLTVDKSRWQQGNVFSCSVMHEALHNHYTQKSLSLSPGGGGGSGGGGSQVQLVESGGGVVQPGRSLRLSCAASGFTFSNYGMYWVRQAPGKGLEWVAVIWYDGSNKYYADSVKGRFTISRDNSKNTLYLQMNSLRAEDTAVYYCARDLWGWYFDYWGQGTLVTVSSGGGGSGGGGSGGGGSGGGGSEIVLTQSPATLSLSPGERATLSCRASQSVSSYLAWYQQKPGQAPRLLIYDASNRATGIPARFSGSGSGTDFTLTISSLEPEDFAVYYCQQRRNWPLTFGGGTKVEIK

SEQ ID NO: 820 - protein, 473 aa, Artificial Sequence
  Description of Artificial Sequence: Synthetic polypeptide
DIQMTQSPSSVSASVGDRVTITCRASQGIYSWLAWYQQKPGKAPNLLIYTASTLQSGVPSRFSGSGSGTDFTLTISSLQPEDFATYYCQQANIFPLTFGGGTKVEIKRTVAAPSVFIFPPSDEQLKSGTASVVCLLNNFYPREAKVQWKVDNALQSGNSQESVTEQDSKDSTYSLSSTLTLSKADYEKHKVYACEVTHQGLSSPVTKSFNRGECGGGGSGGGGSQVQLVQSGAEVKKPGASVKVSCKASGYTFTEFGMNWVRQAPGQGLEWMGWINTKTGEATYVEEFKGRVTFTTDTSTSTAYMELRSLRSDDTAVYYCARWDFAYYVEAMDYWGQGTTVTVSSGGGGSGGGGSGGGGSGGGGSDIQMTQSPSSLSASVGDRVTITCKASAAVGTYVAWYQQKPGKAPKLLIYSASYRKRGVPSRFSGSGSGTDFTLTISSLQPEDFATYYCHQYYTYPLFTFGQGTKLEIK

SEQ ID NO: 821 - protein, 473 aa, Artificial Sequence
  Description of Artificial Sequence: Synthetic polypeptide
EIVLTQSPATLSLSPGERATLSCRASQSVSSYLAWYQQKPGQAPRLLIYDASNRATGIPARFSGSGSGTDFTLTISSLEPEDFAVYYCQQRRNWPLTFGGGTKVEIKRTVAAPSVFIFPPSDEQLKSGTASVVCLLNNFYPREAKVQWKVDNALQSGNSQESVTEQDSKDSTYSLSSTLTLSKADYEKHKVYACEVTHQGLSSPVTKSFNRGECGGGGSGGGGSQVQLVQSGAEVKKPGASVKVSCKASGYTFTEFGMNWVRQAPGQGLEWMGWINTKTGEATYVEEFKGRVTFTTDTSTSTAYMELRSLRSDDTAVYYCARWDFAYYVEAMDYWGQGTTVTVSSGGGGSGGGGSGGGGSGGGGSDIQMTQSPSSLSASVGDRVTITCKASAAVGTYVAWYQQKPGKAPKLLIYSASYRKRGVPSRFSGSGSGTDFTLTISSLQPEDFATYYCHQYYTYPLFTFGQGTKLEIK

SEQ ID NO: 822 - protein, 470 aa, Artificial Sequence
  Description of Artificial Sequence: Synthetic polypeptide
DIQMTQSPSSLSASVGDRVTITCKASAAVGTYVAWYQQKPGKAPKLLIYSASYRKRGVPSRFSGSGSGTDFTLTISSLQPEDFATYYCHQYYTYPLFTFGQGTKLEIKRTVAAPSVFIFPPSDEQLKSGTASVVCLLNNFYPREAKVQWKVDNALQSGNSQESVTEQDSKDSTYSLSSTLTLSKADYEKHKVYACEVTHQGLSSPVTKSFNRGECGGGGSGGGGSQVQLVESGGGVVQPGRSLRLSCAASGFTFSNYGMYWVRQAPGKGLEWVAVIWYDGSNKYYADSVKGRFTISRDNSKNTLYLQMNSLRAEDTAVYYCARDLWGWYFDYWGQGTLVTVSSGGGGSGGGGSGGGGSGGGGSEIVLTQSPATLSLSPGERATLSCRASQSVSSYLAWYQQKPGQAPRLLIYDASNRATGIPARFSGSGSGTDFTLTISSLEPEDFAVYYCQQRRNWPLTFGGGTKVEIK

SEQ ID NO: 823 - protein, 8 aa, Artificial Sequence
  Description of Artificial Sequence: Synthetic peptide
GFVFSSYD

SEQ ID NO: 824 - protein, 9 aa, Artificial Sequence
  Description of Artificial Sequence: Synthetic peptide
YISSGGGIT

SEQ ID NO: 825 - protein, 13 aa, Artificial Sequence
  Description of Artificial Sequence: Synthetic peptide
AAHYFGSSGPFAY

SEQ ID NO: 826 - protein, 6 aa, Artificial Sequence
  Description of Artificial Sequence: Synthetic peptide
ENIFSY

SEQ ID NO: 827 - protein, 3 aa, Artificial Sequence
  Description of Artificial Sequence: Synthetic peptide
NTR

SEQ ID NO: 828 - protein, 9 aa, Artificial Sequence
  Description of Artificial Sequence: Synthetic peptide
QHHYGTPFT

SEQ ID NO: 829 - protein, 120 aa, Artificial Sequence [sequence omitted]

SEQ ID NO: 830 - protein, 107 aa, Artificial Sequence [sequence omitted]

SEQ ID NO: 831 - protein, 450 aa, Artificial Sequence
  Description of Artificial Sequence: Synthetic polypeptide
EVQLQESGPGLVKPGGSLSLSCAASGFVFSSYDMSWVRQTPERGLEWVAYISSGGGITYAPSTVKGRFTVSRDNAKNTLYLQMNSLTSEDTAVYYCAAHYFGSSGPFAYWGQGTLVTVSSASTKGPSVFPLAPSSKSTSGGTAALGCLVKDYFPEPVTVSWNSGALTSGVHTFPAVLQSSGLYSLSSVVTVPSSSLGTQTYICNVNHKPSNTKVDKKVEPKSCDKTHTCPPCPAPELLGGPSVFLFPPKPKDTLMISRTPEVTCVVVDVSHEDPEVKFNWYVDGVEVHNAKTKPREEQYNSTYRVVSVLTVLHQDWLNGKEYKCKVSNKALPAPIEKTISKAKGQPREPQVYTLPPSREEMTKNQVSLTCLVKGFYPSDIAVEWESNGQPENNYKTTPPVLDSDGSFFLYSKLTVDKSRWQQGNVFSCSVMHEALHNHYTQKSLSLSPGK

SEQ ID NO: 832 - protein, 214 aa, Artificial Sequence
  Description of Artificial Sequence: Synthetic polypeptide
DIQMTQSPASLSASVGDRVTITCRASENIFSYLAWYQQKPGKSPKLLVYNTRTLAEGVPSRFSGSGSGTDFSLTISSLQPEDFATYYCQHHYGTPFTFGSGTKLEIKRTVAAPSVFIFPPSDEQLKSGTASVVCLLNNFYPREAKVQWKVDNALQSGNSQESVTEQDSKDSTYSLSSTLTLSKADYEKHKVYACEVTHQGLSSPVTKSFNRGEC

SEQ ID NO: 833 - protein, 712 aa, Artificial Sequence
  Description of Artificial Sequence: Synthetic polypeptide
QVQLVQSGAEVKKPGASVKVSCKASGYTFTGYYMHWVRQAPGQGLEWMGWINPDSGGTNYAQKFQGRVTMTRDTSISTAYMELNRLRSDDTAVYYCARDQPLGYCTNGVCSYFDYWGQGTLVTVSSASTKGPSVFPLAPSSKSTSGGTAALGCLVKDYFPEPVTVSWNSGALTSGVHTFPAVLQSSGLYSLSSVVTVPSSSLGTQTYICNVNHKPSNTKVDKKVEPKSCDKTHTCPPCPAPELLGGPSVFLFPPKPKDTLMISRTPEVTCVVVDVSHEDPEVKFNWYVDGVEVHNAKTKPREEQYNSTYRVVSVLTVLHQDWLNGKEYKCKVSNKALPAPIEKTISKAKGQPREPQVYTLPPSREEMTKNQVSLTCLVKGFYPSDIAVEWESNGQPENNYKTTPPVLDSDGSFFLYSKLTVDKSRWQQGNVFSCSVMHEALHNHYTQKSLSLSPGGGGGSGGGGSEVQLQESGPGLVKPGGSLSLSCAASGFVFSSYDMSWVRQTPERGLEWVAYISSGGGITYAPSTVKGRFTVSRDNAKNTLYLQMNSLTSEDTAVYYCAAHYFGSSGPFAYWGQGTLVTVSSGGGGSGGGGSGGGGSGGGGSDIQMTQSPASLSASVGDRVTITCRASENIFSYLAWYQQKPGKSPKLLVYNTRTLAEGVPSRFSGSGSGTDFSLTISSLQPEDFATYYCQHHYGTPFTFGSGTKLEIK

SEQ ID NO: 834 - protein, 712 aa, Artificial Sequence
  Description of Artificial Sequence: Synthetic polypeptide
EVQLQESGPGLVKPGGSLSLSCAASGFVFSSYDMSWVRQTPERGLEWVAYISSGGGITYAPSTVKGRFTVSRDNAKNTLYLQMNSLTSEDTAVYYCAAHYFGSSGPFAYWGQGTLVTVSSASTKGPSVFPLAPSSKSTSGGTAALGCLVKDYFPEPVTVSWNSGALTSGVHTFPAVLQSSGLYSLSSVVTVPSSSLGTQTYICNVNHKPSNTKVDKKVEPKSCDKTHTCPPCPAPELLGGPSVFLFPPKPKDTLMISRTPEVTCVVVDVSHEDPEVKFNWYVDGVEVHNAKTKPREEQYNSTYRVVSVLTVLHQDWLNGKEYKCKVSNKALPAPIEKTISKAKGQPREPQVYTLPPSREEMTKNQVSLTCLVKGFYPSDIAVEWESNGQPENNYKTTPPVLDSDGSFFLYSKLTVDKSRWQQGNVFSCSVMHEALHNHYTQKSLSLSPGGGGGSGGGGSQVQLVQSGAEVKKPGASVKVSCKASGYTFTGYYMHWVRQAPGQGLEWMGWINPDSGGTNYAQKFQGRVTMTRDTSISTAYMELNRLRSDDTAVYYCARDQPLGYCTNGVCSYFDYWGQGTLVTVSSGGGGSGGGGSGGGGSGGGGSDIQMTQSPSSVSASVGDRVTITCRASQGIYSWLAWYQQKPGKAPNLLIYTASTLQSGVPSRFSGSGSGTDFTLTISSLQPEDFATYYCQQANIFPLTFGGGTKVEIK

SEQ ID NO: 835 - protein, 477 aa, Artificial Sequence
  Description of Artificial Sequence: Synthetic polypeptide
DIQMTQSPASLSASVGDRVTITCRASENIFSYLAWYQQKPGKSPKLLVYNTRTLAEGVPSRFSGSGSGTDFSLTISSLQPEDFATYYCQHHYGTPFTFGSGTKLEIKRTVAAPSVFIFPPSDEQLKSGTASVVCLLNNFYPREAKVQWKVDNALQSGNSQESVTEQDSKDSTYSLSSTLTLSKADYEKHKVYACEVTHQGLSSPVTKSFNRGECGGGGSGGGGSQVQLVQSGAEVKKPGASVKVSCKASGYTFTGYYMHWVRQAPGQGLEWMGWINPDSGGTNYAQKFQGRVTMTRDTSISTAYMELNRLRSDDTAVYYCARDQPLGYCTNGVCSYFDYWGQGTLVTVSSGGGGSGGGGSGGGGSGGGGSDIQMTQSPSSVSASVGDRVTITCRASQGIYSWLAWYQQKPGKAPNLLIYTASTLQSGVPSRFSGSGSGTDFTLTISSLQPEDFATYYCQQANIFPLTFGGGTKVEIK

SEQ ID NO: 836 - protein, 704 aa, Artificial Sequence
  Description of Artificial Sequence: Synthetic polypeptide
QVQLVESGGGVVQPGRSLRLSCAASGFTFSNYGMYWVRQAPGKGLEWVAVIWYDGSNKYYADSVKGRFTISRDNSKNTLYLQMNSLRAEDTAVYYCARDLWGWYFDYWGQGTLVTVSSASTKGPSVFPLAPSSKSTSGGTAALGCLVKDYFPEPVTVSWNSGALTSGVHTFPAVLQSSGLYSLSSVVTVPSSSLGTQTYICNVNHKPSNTKVDKKVEPKSCDKTHTCPPCPAPELLGGPSVFLFPPKPKDTLMISRTPEVTCVVVDVSHEDPEVKFNWYVDGVEVHNAKTKPREEQYNSTYRVVSVLTVLHQDWLNGKEYKCKVSNKALPAPIEKTISKAKGQPREPQVYTLPPSREEMTKNQVSLTCLVKGFYPSDIAVEWESNGQPENNYKTTPPVLDSDGSFFLYSKLTVDKSRWQQGNVFSCSVMHEALHNHYTQKSLSLSPGGGGGSGGGGSEVQLQESGPGLVKPGGSLSLSCAASGFVFSSYDMSWVRQTPERGLEWVAYISSGGGITYAPSTVKGRFTVSRDNAKNTLYLQMNSLTSEDTAVYYCAAHYFGSSGPFAYWGQGTLVTVSSGGGGSGGGGSGGGGSGGGGSDIQMTQSPASLSASVGDRVTITCRASENIFSYLAWYQQKPGKSPKLLVYNTRTLAEGVPSRFSGSGSGTDFSLTISSLQPEDFATYYCQHHYGTPFTFGSGTKLEIK

SEQ ID NO: 837 - protein, 704 aa, Artificial Sequence
  Description of Artificial Sequence: Synthetic polypeptide
EVQLQESGPGLVKPGGSLSLSCAASGFVFSSYDMSWVRQTPERGLEWVAYISSGGGITYAPSTVKGRFTVSRDNAKNTLYLQMNSLTSEDTAVYYCAAHYFGSSGPFAYWGQGTLVTVSSASTKGPSVFPLAPSSKSTSGGTAALGCLVKDYFPEPVTVSWNSGALTSGVHTFPAVLQSSGLYSLSSVVTVPSSSLGTQTYICNVNHKPSNTKVDKKVEPKSCDKTHTCPPCPAPELLGGPSVFLFPPKPKDTLMISRTPEVTCVVVDVSHEDPEVKFNWYVDGVEVHNAKTKPREEQYNSTYRVVSVLTVLHQDWLNGKEYKCKVSNKALPAPIEKTISKAKGQPREPQVYTLPPSREEMTKNQVSLTCLVKGFYPSDIAVEWESNGQPENNYKTTPPVLDSDGSFFLYSKLTVDKSRWQQGNVFSCSVMHEALHNHYTQKSLSLSPGGGGGSGGGGSQVQLVESGGGVVQPGRSLRLSCAASGFTFSNYGMYWVRQAPGKGLEWVAVIWYDGSNKYYADSVKGRFTISRDNSKNTLYLQMNSLRAEDTAVYYCARDLWGWYFDYWGQGTLVTVSSGGGGSGGGGSGGGGSGGGGSEIVLTQSPATLSLSPGERATLSCRASQSVSSYLAWYQQKPGQAPRLLIYDASNRATGIPARFSGSGSGTDFTLTISSLEPEDFAVYYCQQRRNWPLTFGGGTKVEIK

SEQ ID NO: 838 - protein, 471 aa, Artificial Sequence
  Description of Artificial Sequence: Synthetic polypeptide
DIQMTQSPSSVSASVGDRVTITCRASQGIYSWLAWYQQKPGKAPNLLIYTASTLQSGVPSRFSGSGSGTDFTLTISSLQPEDFATYYCQQANIFPLTFGGGTKVEIKRTVAAPSVFIFPPSDEQLKSGTASVVCLLNNFYPREAKVQWKVDNALQSGNSQESVTEQDSKDSTYSLSSTLTLSKADYEKHKVYACEVTHQGLSSPVTKSFNRGECGGGGSGGGGSEVQLQESGPGLVKPGGSLSLSCAASGFVFSSYDMSWVRQTPERGLEWVAYISSGGGITYAPSTVKGRFTVSRDNAKNTLYLQMNSLTSEDTAVYYCAAHYFGSSGPFAYWGQGTLVTVSSGGGGSGGGGSGGGGSGGGGSDIQMTQSPASLSASVGDRVTITCRASENIFSYLAWYQQKPGKSPKLLVYNTRTLAEGVPSRFSGSGSGTDFSLTISSLQPEDFATYYCQHHYGTPFTFGSGTKLEIK

SEQ ID NO: 839 - protein, 471 aa, Artificial Sequence
  Description of Artificial Sequence: Synthetic polypeptide
EIVLTQSPATLSLSPGERATLSCRASQSVSSYLAWYQQKPGQAPRLLIYDASNRATGIPARFSGSGSGTDFTLTISSLEPEDFAVYYCQQRRNWPLTFGGGTKVEIKRTVAAPSVFIFPPSDEQLKSGTASVVCLLNNFYPREAKVQWKVDNALQSGNSQESVTEQDSKDSTYSLSSTLTLSKADYEKHKVYACEVTHQGLSSPVTKSFNRGECGGGGSGGGGSEVQLQESGPGLVKPGGSLSLSCAASGFVFSSYDMSWVRQTPERGLEWVAYISSGGGITYAPSTVKGRFTVSRDNAKNTLYLQMNSLTSEDTAVYYCAAHYFGSSGPFAYWGQGTLVTVSSGGGGSGGGGSGGGGSGGGGSDIQMTQSPASLSASVGDRVTITCRASENIFSYLAWYQQKPGKSPKLLVYNTRTLAEGVPSRFSGSGSGTDFSLTISSLQPEDFATYYCQHHYGTPFTFGSGTKLEIK

SEQ ID NO: 840 - protein, 469 aa, Artificial Sequence
  Description of Artificial Sequence: Synthetic polypeptide
DIQMTQSPASLSASVGDRVTITCRASENIFSYLAWYQQKPGKSPKLLVYNTRTLAEGVPSRFSGSGSGTDFSLTISSLQPEDFATYYCQHHYGTPFTFGSGTKLEIKRTVAAPSVFIFPPSDEQLKSGTASVVCLLNNFYPREAKVQWKVDNALQSGNSQESVTEQDSKDSTYSLSSTLTLSKADYEKHKVYACEVTHQGLSSPVTKSFNRGECGGGGSGGGGSQVQLVESGGGVVQPGRSLRLSCAASGFTFSNYGMYWVRQAPGKGLEWVAVIWYDGSNKYYADSVKGRFTISRDNSKNTLYLQMNSLRAEDTAVYYCARDLWGWYFDYWGQGTLVTVSSGGGGSGGGGSGGGGSGGGGSEIVLTQSPATLSLSPGERATLSCRASQSVSSYLAWYQQKPGQAPRLLIYDASNRATGIPARFSGSGSGTDFTLTISSLEPEDFAVYYCQQRRNWPLTFGGGTKVEIK

SEQ ID NO: 841 - protein, 712 aa, Artificial Sequence
  Description of Artificial Sequence: Synthetic polypeptide
EVQLQESGPGLVKPGGSLSLSCAASGFVFSSYDMSWVRQTPERGLEWVAYISSGGGITYAPSTVKGRFTVSRDNAKNTLYLQMNSLTSEDTAVYYCAAHYFGSSGPFAYWGQGTLVTVSSASTKGPSVFPLAPSSKSTSGGTAALGCLVKDYFPEPVTVSWNSGALTSGVHTFPAVLQSSGLYSLSSVVTVPSSSLGTQTYICNVNHKPSNTKVDKKVEPKSCDKTHTCPPCPAPELLGGPSVFLFPPKPKDTLMISRTPEVTCVVVDVSHEDPEVKFNWYVDGVEVHNAKTKPREEQYNSTYRVVSVLTVLHQDWLNGKEYKCKVSNKALPAPIEKTISKAKGQPREPQVYTLPPSREEMTKNQVSLTCLVKGFYPSDIAVEWESNGQPENNYKTTPPVLDSDGSFFLYSKLTVDKSRWQQGNVFSCSVMHEALHNHYTQKSLSLSPGGGGGSGGGGSDIQMTQSPSSVSASVGDRVTITCRASQGIYSWLAWYQQKPGKAPNLLIYTASTLQSGVPSRFSGSGSGTDFTLTISSLQPEDFATYYCQQANIFPLTFGGGTKVEIKGGGGSGGGGSGGGGSGGGGSQVQLVQSGAEVKKPGASVKVSCKASGYTFTGYYMHWVRQAPGQGLEWMGWINPDSGGTNYAQKFQGRVTMTRDTSISTAYMELNRLRSDDTAVYYCARDQPLGYCTNGVCSYFDYWGQGTLVTVSS

SEQ ID NO: 842 - protein, 477 aa, Artificial Sequence
  Description of Artificial Sequence: Synthetic polypeptide
DIQMTQSPASLSASVGDRVTITCRASENIFSYLAWYQQKPGKSPKLLVYNTRTLAEGVPSRFSGSGSGTDFSLTISSLQPEDFATYYCQHHYGTPFTFGSGTKLEIKRTVAAPSVFIFPPSDEQLKSGTASVVCLLNNFYPREAKVQWKVDNALQSGNSQESVTEQDSKDSTYSLSSTLTLSKADYEKHKVYACEVTHQGLSSPVTKSFNRGECGGGGSGGGGSDIQMTQSPSSVSASVGDRVTITCRASQGIYSWLAWYQQKPGKAPNLLIYTASTLQSGVPSRFSGSGSGTDFTLTISSLQPEDFATYYCQQANIFPLTFGGGTKVEIKGGGGSGGGGSGGGGSGGGGSQVQLVQSGAEVKKPGASVKVSCKASGYTFTGYYMHWVRQAPGQGLEWMGWINPDSGGTNYAQKFQGRVTMTRDTSISTAYMELNRLRSDDTAVYYCARDQPLGYCTNGVCSYFDYWGQGTLVTVSS

SEQ ID NO: 843 - protein, 713 aa, Artificial Sequence
  Description of Artificial Sequence: Synthetic polypeptide
QVQLVQSGAEVKKPGASVKVSCKASGYTFTEFGMNWVRQAPGQGLEWMGWINTKTGEATYVEEFKGRVTFTTDTSTSTAYMELRSLRSDDTAVYYCARWDFAYYVEAMDYWGQGTTVTVSSASTKGPSVFPLAPSSKSTSGGTAALGCLVKDYFPEPVTVSWNSGALTSGVHTFPAVLQSSGLYSLSSVVTVPSSSLGTQTYICNVNHKPSNTKVDKKVEPKSCDKTHTCPPCPAPELLGGPSVFLFPPKPKDTLMISRTPEVTCVVVDVSHEDPEVKFNWYVDGVEVHNAKTKPREEQYNSTYRVVSVLTVLHQDWLNGKEYKCKVSNKALPAPIEKTISKAKGQPREPQVYTLPPSREEMTKNQVSLTCLVKGFYPSDIAVEWESNGQPENNYKTTPPVLDSDGSFFLYSKLTVDKSRWQQGNVFSCSVMHEALHNHYTQKSLSLSPGGGGGSGGGGSDIQMTQSPSSVSASVGDRVTITCRASQGIYSWLAWYQQKPGKAPNLLIYTASTLQSGVPSRFSGSGSGTDFTLTISSLQPEDFATYYCQQANIFPLTFGGGTKVEIKGGGGSGGGGSGGGGSGGGGSQVQLVQSGAEVKKPGASVKVSCKASGYTFTGYYMHWVRQAPGQGLEWMGWINPDSGGTNYAQKFQGRVTMTRDTSISTAYMELNRLRSDDTAVYYCARDQPLGYCTNGVCSYFDYWGQGTLVTVSS

SEQ ID NO: 844 - protein, 478 aa, Artificial Sequence
  Description of Artificial Sequence: Synthetic polypeptide
DIQMTQSPSSLSASVGDRVTITCKASAAVGTYVAWYQQKPGKAPKLLIYSASYRKRGVPSRFSGSGSGTDFTLTISSLQPEDFATYYCHQYYTYPLFTFGQGTKLEIKRTVAAPSVFIFPPSDEQLKSGTASVVCLLNNFYPREAKVQWKVDNALQSGNSQESVTEQDSKDSTYSLSSTLTLSKADYEKHKVYACEVTHQGLSSPVTKSFNRGECGGGGSGGGGSDIQMTQSPSSVSASVGDRVTITCRASQGIYSWLAWYQQKPGKAPNLLIYTASTLQSGVPSRFSGSGSGTDFTLTISSLQPEDFATYYCQQANIFPLTFGGGTKVEIKGGGGSGGGGSGGGGSGGGGSQVQLVQSGAEVKKPGASVKVSCKASGYTFTGYYMHWVRQAPGQGLEWMGWINPDSGGTNYAQKFQGRVTMTRDTSISTAYMELNRLRSDDTAVYYCARDQPLGYCTNGVCSYFDYWGQGTLVTVSS

SEQ ID NO: 845 - protein, 711 aa, Artificial Sequence
  Description of Artificial Sequence: Synthetic polypeptide
EVQLVESGGGLVQPGGSLRLSCAASGFTFTDYTMDWVRQAPGKGLEWVADVNPNSGGSIYNQRFKGRFTLSVDRSKNTLYLQMNSLRAEDTAVYYCARNLGPSFYFDYWGQGTLVTVSSASTKGPSVFPLAPSSKSTSGGTAALGCLVKDYFPEPVTVSWNSGALTSGVHTFPAVLQSSGLYSLSSVVTVPSSSLGTQTYICNVNHKPSNTKVDKKVEPKSCDKTHTCPPCPAPELLGGPSVFLFPPKPKDTLMISRTPEVTCVVVDVSHEDPEVKFNWYVDGVEVHNAKTKPREEQYNSTYRVVSVLTVLHQDWLNGKEYKCKVSNKALPAPIEKTISKAKGQPREPQVYTLPPSREEMTKNQVSLTCLVKGFYPSDIAVEWESNGQPENNYKTTPPVLDSDGSFFLYSKLTVDKSRWQQGNVFSCSVMHEALHNHYTQKSLSLSPGGGGGSGGGGSDIQMTQSPSSVSASVGDRVTITCRASQGIYSWLAWYQQKPGKAPNLLIYTASTLQSGVPSRFSGSGSGTDFTLTISSLQPEDFATYYCQQANIFPLTFGGGTKVEIKGGGGSGGGGSGGGGSGGGGSQVQLVQSGAEVKKPGASVKVSCKASGYTFTGYYMHWVRQAPGQGLEWMGWINPDSGGTNYAQKFQGRVTMTRDTSISTAYMELNRLRSDDTAVYYCARDQPLGYCTNGVCSYFDYWGQGTLVTVSS

SEQ ID NO: 846 - protein, 477 aa, Artificial Sequence
  Description of Artificial Sequence: Synthetic polypeptide
DIQMTQSPSSLSASVGDRVTITCKASQDVSIGVAWYQQKPGKAPKLLIYSASYRYTGVPSRFSGSGSGTDFTLTISSLQPEDFATYYCQQYYIYPYTFGQGTKVEIKRTVAAPSVFIFPPSDEQLKSGTASVVCLLNNFYPREAKVQWKVDNALQSGNSQESVTEQDSKDSTYSLSSTLTLSKADYEKHKVYACEVTHQGLSSPVTKSFNRGECGGGGSGGGGSDIQMTQSPSSVSASVGDRVTITCRASQGIYSWLAWYQQKPGKAPNLLIYTASTLQSGVPSRFSGSGSGTDFTLTISSLQPEDFATYYCQQANIFPLTFGGGTKVEIKGGGGSGGGGSGGGGSGGGGSQVQLVQSGAEVKKPGASVKVSCKASGYTFTGYYMHWVRQAPGQGLEWMGWINPDSGGTNYAQKFQGRVTMTRDTSISTAYMELNRLRSDDTAVYYCARDQPLGYCTNGVCSYFDYWGQGTLVTVSS

SEQ ID NO: 847 - protein, 20 aa, Artificial Sequence
  Description of Artificial Sequence: Synthetic peptide
MRLPAQLLGLLLLWFPGSRC

SEQ ID NO: 848 - protein, 19 aa, Artificial Sequence
  Description of Artificial Sequence: Synthetic peptide
MDWTWRILFLVAAATGAHS

SEQ ID NO: 849 - protein, 17 aa, Artificial Sequence
  Description of Artificial Sequence: Synthetic peptide
MRAWIFFLLCLAGRALA

SEQ ID NO: 850 - protein, 1255 aa, Homo sapiens [sequence omitted]

SEQ ID NO: 851 - protein, 645 aa, Homo sapiens
MPIWKFPDEEGACQPCPINCTHSCVDLDDKGCPAEQRASPLTSIISAVVGILLVVVLGVVFGILIKRRQQKIRKYTMRRLLQETELVEPLTPSGAMPNQAQMRILKETELRKVKVLGSGAFGTVYKGIWIPDGENVKIPVAIKVLRENTSPKANKEILDEAYVMAGVGSPYVSRLLGICLTSTVQLVTQLMPYGCLLDHVRENRGRLGSQDLLNWCMQIAKGMSYLEDVRLVHRDLAARNVLVKSPNHVKITDFGLARLLDIDETEYHADGGKVPIKWMALESILRRRFTHQSDVWSYGVTVWELMTFGAKPYDGIPAREIPDLLEKGERLPQPPICTIDVYMIMVKCWMIDSECRPRFRELVSEFSRMARDPQRFVVIQNEDLGPASPLDSTFYRSLLEDDDMGDLVDAEEYLVPQQGFFCPDPAPGAGGMVHHRHRSSSTRSGGGDLTLGLEPSEEEAPRSPLAPSEGAGSDVFDGDLGMGAAKGLQSLPTHDPSPLQRYSEDPTVPLPSETDGYVAPLTCSPQPEYVNQPDVRPQPPSPREGPLPAARPAGATLERPKTLSPGKNGVVKDVFAFGGAVENPEYLTPQGGAAPQPHPPPAFSPAFDNLYYWDQDPPERGAPPSTFKGTPTAENPEYLGLDVPV

SEQ ID NO: 852 - protein, 569 aa, Homo sapiens
MRRLLQETELVEPLTPSGAMPNQAQMRILKETELRKVKVLGSGAFGTVYKGIWIPDGENVKIPVAIKVLRENTSPKANKEILDEAYVMAGVGSPYVSRLLGICLTSTVQLVTQLMPYGCLLDHVRENRGRLGSQDLLNWCMQIAKGMSYLEDVRLVHRDLAARNVLVKSPNHVKITDFGLARLLDIDETEYHADGGKVPIKWMALESILRRRFTHQSDVWSYGVTVWELMTFGAKPYDGIPAREIPDLLEKGERLPQPPICTIDVYMIMVKCWMIDSECRPRFRELVSEFSRMARDPQRFVVIQNEDLGPASPLDSTFYRSLLEDDDMGDLVDAEEYLVPQQGFFCPDPAPGAGGMVHHRHRSSSTRSGGGDLTLGLEPSEEEAPRSPLAPSEGAGSDVFDGDLGMGAAKGLQSLPTHDPSPLQRYSEDPTVPLPSETDGYVAPLTCSPQPEYVNQPDVRPQPPSPREGPLPAARPAGATLERPKTLSPGKNGVVKDVFAFGGAVENPEYLTPQGGAAPQPHPPPAFSPAFDNLYYWDQDPPERGAPPSTFKGTPTAENPEYLGLDVPV

SEQ ID NO: 853 - protein, 1240 aa, Homo sapiens
MPRGSWKPQVCTGTDMKLRLPASPETHLDMLRHLYQGCQVVQGNLELTYLPTNASLSFLQDIQEVQGYVLIAHNQVRQVPLQRLRIVRGTQLFEDNYALAVLDNGDPLNNTTPVTGASPGGLRELQLRSLTEILKGGVLIQRNPQLCYQDTILWKDIFHKNNQLALTLIDTNRSRACHPCSPMCKGSRCWGESSEDCQSLTRTVCAGGCARCKGPLPTDCCHEQCAAGCTGPKHSDCLACLHFNHSGICELHCPALVTYNTDTFESMPNPEGRYTFGASCVTACPYNYLSTDVGSCTLVCPLHNQEVTAEDGTQRCEKCSKPCARVCYGLGMEHLREVRAVTSANIQEFAGCKKIFGSLAFLPESFDGDPASNTAPLQPEQLQVFETLEEITGYLYISAWPDSLPDLSVFQNLQVIRGRILHNGAYSLTLQGLGISWLGLRSLRELGSGLALIHHNTHLCFVHTVPWDQLFRNPHQALLHTANRPEDECVGEGLACHQLCARGHCWGPGPTQCVNCSQFLRGQECVEECRVLQGLPREYVNARHCLPCHPECQPQNGSVTCFGPEADQCVACAHYKDPPFCVARCPSGVKPDLSYMPIWKFPDEEGACQPCPINCTHSCVDLDDKGCPAEQRASPLTSIISAVVGILLVVVLGVVFGILIKRRQQKIRKYTMRRLLQETELVEPLTPSGAMPNQAQMRILKETELRKVKVLGSGAFGTVYKGIWIPDGENVKIPVAIKVLRENTSPKANKEILDEAYVMAGVGSPYVSRLLGICLTSTVQLVTQLMPYGCLLDHVRENRGRLGSQDLLNWCMQIAKGMSYLEDVRLVHRDLAARNVLVKSPNHVKITDFGLARLLDIDETEYHADGGKVPIKWMALESILRRRFTHQSDVWSYGVTVWELMTFGAKPYDGIPAREIPDLLEKGERLPQPPICTIDVYMIMVKCWMIDSECRPRFRELVSEFSRMARDPQRFVVIQNEDLGPASPLDSTFYRSLLEDDDMGDLVDAEEYLVPQQGFFCPDPAPGAGGMVHHRHRSSSTRSGGGDLTLGLEPSEEEAPRSPLAPSEGAGSDVFDGDLGMGAAKGLQSLPTHDPSPLQRYSEDPTVPLPSETDGYVAPLTCSPQPEYVNQPDVRPQPPSPREGPLPAARPAGATLERPKTLSPGKNGVVKDVFAFGGAVENPEYLTPQGGAAPQPHPPPAFSPAFDNLYYWDQDPPERGAPPSTFKGTPTAENPEYLGLDVPV

SEQ ID NO: 854 - protein, 1215 aa, Homo sapiens
MKLRLPASPETHLDMLRHLYQGCQVVQGNLELTYLPTNASLSFLQDIQEVQGYVLIAHNQVRQVPLQRLRIVRGTQLFEDNYALAVLDNGDPLNNTTPVTGASPGGLRELQLRSLTEILKGGVLIQRNPQLCYQDTILWKDIFHKNNQLALTLIDTNRSRACHPCSPMCKGSRCWGESSEDCQSLTRTVCAGGCARCKGPLPTDCCHEQCAAGCTGPKHSDCLACLHFNHSGICELHCPALVTYNTDTFESMPNPEGRYTFGASCVTACPYNYLSTDVGSCTLVCPLHNQEVTAEDGTQRCEKCSKPCARVCYGLGMEHLREVRAVTSANIQEFAGCKKIFGSLAFLPESFDGDPASNTAPLQPEQLQVFETLEEITGYLYISAWPDSLPDLSVFQNLQVIRGRILHNGAYSLTLQGLGISWLGLRSLRELGSGLALIHHNTHLCFVHTVPWDQLFRNPHQALLHTANRPEDECVGEGLACHQLCARGHCWGPGPTQCVNCSQFLRGQECVEECRVLQGLPREYVNARHCLPCHPECQPQNGSVTCFGPEADQCVACAHYKDPPFCVARCPSGVKPDLSYMPIWKFPDEETHSCVDLDDKGCPAEQRASPLTSIISAVVGILLVVVLGVVFGILIKRRQQKIRKYTMRRLLQETELVEPLTPSGAMPNQAQMRILKETELRKVKVLGSGAFGTVYKGIWIPDGENVKIPVAIKVLRENTSPKANKEILDEAYVMAGVGSPYVSRLLGICLTSTVQLVTQLMPYGCLLDHVRENRGRLGSQDLLNWCMQIAKGMSYLEDVRLVHRDLAARNVLVKSPNHVKITDFGLARLLDIDETEYHADGGKVPIKWMALESILRRRFTHQSDVWSYGVTVWELMTFGAKPYDGIPAREIPDLLEKGERLPQPPICTIDVYMIMVKCWMIDSECRPRFRELVSEFSRMARDPQRFVVIQNEDLGPASPLDSTFYRSLLEDDDMGDLVDAEEYLVPQQGFFCPDPAPGAGGMVHHRHRSSSTRSGGGDLTLGLEPSEEEAPRSPLAPSEGAGSDVFDGDLGMGAAKGLQSLPTHDPSPLQRYSEDPTVPLPSETDGYVAPLTCSPQPEYVNQPDVRPQPPSPREGPLPAARPAGATLERPKTLSPGKNGVVKDVFAFGGAVENPEYLTPQGGAAPQPHPPPAFSPAFDNLYYWDQDPPERGAPPSTFKGTPTAENPEYLGLDVPV

SEQ ID NO: 855 - protein, 878 aa, Homo sapiens
MELAALCRWGLLLALLPPGAASTQVCTGTDMKLRLPASPETHLDMLRHLYQGCQVVQGNLELTYLPTNASLSFLQDIQEVQGYVLIAHNQVRQVPLQRLRIVRGTQLFEDNYALAVLDNGDPLNNTTPVTGASPGGLRELQLRSLTEILKGGVLIQRNPQLCYQDTILWKDIFHKNNQLALTLIDTNRSRACHPCSPMCKGSRCWGESSEDCQSLTRTVCAGGCARCKGPLPTDCCHEQCAAGCTGPKHSDCLACLHFNHSGICELHCPALVTYNTDTFESMPNPEGRYTFGASCVTACPYNYLSTDVGSCTLVCPLHNQEVTAEDGTQRCEKCSKPCARVCYGLGMEHLREVRAVTSANIQEFAGCKKIFGSLAFLPESFDGDPASNTAPLQPEQLQVFETLEEITGYLYISAWPDSLPDLSVFQNLQVIRGRILHNGAYSLTLQGLGISWLGLRSLRELGSGLALIHHNTHLCFVHTVPWDQLFRNPHQALLHTANRPEDECVGEGLACHQLCARGHCWGPGPTQCVNCSQFLRGQECVEECRVLQGLPREYVNARHCLPCHPECQPQNGSVTCFGPEADQCVACAHYKDPPFCVARCPSGVKPDLSYMPIWKFPDEEGACQPCPINCTHSPLTSIISAVVGILLVVVLGVVFGILIKRRQQKIRKYTMRRLLQETELVEPLTPSGAMPNQAQMRILKETELRKVKVLGSGAFGTVYKGIWIPDGENVKIPVAIKVLRENTSPKANKEILDETISNLFSNFAPRGPSACCEPTCWCHSGKGQDSLPREEWGRQRRFCLWGCRGEPRVLDTPGRSCPSAPPSSCLQPSLRQPLLLGPGPQRDTYGREPRVPGSGRASVNQKAKSAEALMCPQGAGKA

SEQ ID NO: 856 - protein, 1210 aa, Homo sapiens [sequence omitted]

SEQ ID NO: 857 - protein, 405 aa, Homo sapiens
MRPSGTAGAALLALLAALCPASRALEEKKVCQGTSNKLTQLGTFEDHFLSLQRMFNNCEVVLGNLEITYVQRNYDLSFLKTIQEVAGYVLIALNTVERIPLENLQIIRGNMYYENSYALAVLSNYDANKTGLKELPMRNLQEILHGAVRFSNNPALCNVESIQWRDIVSSDFLSNMSMDFQNHLGSCQKCDPSCPNGSCWGAGEENCQKLTKIICAQQCSGRCRGKSPSDCCHNQCAAGCTGPRESDCLVCRKFRDEATCKDTCPPLMLYNPTTYQMDVNPEGKYSFGATCVKKCPRNYVVTDHGSCVRACGADSYEMEEDGVRKCKKCEGPCRKVCNGIGIGEFKDSLSINATNIKHFKNCTSISGDLHILPVAFRGDSFTHTPPLDPQELDILKTVKEITGLS

SEQ ID NO: 858 - protein, 705 aa, Homo sapiens
MRPSGTAGAALLALLAALCPASRALEEKKVCQGTSNKLTQLGTFEDHFLSLQRMFNNCEVVLGNLEITYVQRNYDLSFLKTIQEVAGYVLIALNTVERIPLENLQIIRGNMYYENSYALAVLSNYDANKTGLKELPMRNLQEILHGAVRFSNNPALCNVESIQWRDIVSSDFLSNMSMDFQNHLGSCQKCDPSCPNGSCWGAGEENCQKLTKIICAQQCSGRCRGKSPSDCCHNQCAAGCTGPRESDCLVCRKFRDEATCKDTCPPLMLYNPTTYQMDVNPEGKYSFGATCVKKCPRNYVVTDHGSCVRACGADSYEMEEDGVRKCKKCEGPCRKVCNGIGIGEFKDSLSINATNIKHFKNCTSISGDLHILPVAFRGDSFTHTPPLDPQELDILKTVKEITGFLLIQAWPENRTDLHAFENLEIIRGRTKQHGQFSLAVVSLNITSLGLRSLKEISDGDVIISGNKNLCYANTINWKKLFGTSGQKTKIISNRGENSCKATGQVCHALCSPEGCWGPEPRDCVSCRNVSRGRECVDKCNLLEGEPREFVENSECIQCHPECLPQAMNITCTGRGPDNCIQCAHYIDGPHCVKTCPAGVMGENNTLVWKYADAGHVCHLCHPNCTYGPGNESLKAMLFCLFKLSSCNQSNDGSVSHQSGSPAAQESCLGWIPSLLPSEFQLGWGGCSHLHAWPSASVIITASSCH

SEQ ID NO: 859 - protein, 628 aa, Homo sapiens
MRPSGTAGAALLALLAALCPASRALEEKKVCQGTSNKLTQLGTFEDHFLSLQRMFNNCEVVLGNLEITYVQRNYDLSFLKTIQEVAGYVLIALNTVERIPLENLQIIRGNMYYENSYALAVLSNYDANKTGLKELPMRNLQEILHGAVRFSNNPALCNVESIQWRDIVSSDFLSNMSMDFQNHLGSCQKCDPSCPNGSCWGAGEENCQKLTKIICAQQCSGRCRGKSPSDCCHNQCAAGCTGPRESDCLVCRKFRDEATCKDTCPPLMLYNPTTYQMDVNPEGKYSFGATCVKKCPRNYVVTDHGSCVRACGADSYEMEEDGVRKCKKCEGPCRKVCNGIGIGEFKDSLSINATNIKHFKNCTSISGDLHILPVAFRGDSFTHTPPLDPQELDILKTVKEITGFLLIQAWPENRTDLHAFENLEIIRGRTKQHGQFSLAVVSLNITSLGLRSLKEISDGDVIISGNKNLCYANTINWKKLFGTSGQKTKIISNRGENSCKATGQVCHALCSPEGCWGPEPRDCVSCRNVSRGRECVDKCNLLEGEPREFVENSECIQCHPECLPQAMNITCTGRGPDNCIQCAHYIDGPHCVKTCPAGVMGENNTLVWKYADAGHVCHLCHPNCTYGS

SEQ ID NO: 860 - protein, 1390 aa, Homo sapiens
MKAPAVLAPGILVLLFTLVQRSNGECKEALAKSEMNVNMKYQLPNFTAETPIQNVILHEHHIFLGATNYIYVLNEEDLQKVAEYKTGPVLEHPDCFPCQDCSSKANLSGGVWKDNINMALVVDTYYDDQLISCGSVNRGTCQRHVFPHNHTADIQSEVHCIFSPQIEEPSQCPDCVVSALGAKVLSSVKDRFINFFVGNTINSSYFPDHPLHSISVRRLKETKDGFMFLTDQSYIDVLPEFRDSYPIKYVHAFESNNFIYFLTVQRETLDAQTFHTRIIRFCSINSGLHSYMEMPLECILTEKRKKRSTKKEVFNILQAAYVSKPGAQLARQIGASLNDDILFGVFAQSKPDSAEPMDRSAMCAFPIKYVNDFFNKIVNKNNVRCLQHFYGPNHEHCFNRTLLRNSSGCEARRDEYRTEFTTALQRVDLFMGQFSEVLLTSISTFIKGDLTIANLGTSEGRFMQVVVSRSGPSTPHVNFLLDSHPVSPEVIVEHTLNQNGYTLVITGKKITKIPLNGLGCRHFQSCSQCLSAPPFVQCGWCHDKCVRSEECLSGTWTQQICLPAIYKVFPNSAPLEGGTRLTICGWDFGFRRNNKFDLKKTRVLLGNESCTLTLSESTMNTLKCTVGPAMNKHFNMSIIISNGHGTTQYSTFSYVDPVITSISPKYGPMAGGTLLTLTGNYLNSGNSRHISIGGKTCTLKSVSNSILECYTPAQTISTEFAVKLKIDLANRETSIFSYREDPIVYEIHPTKSFISGGSTITGVGKNLNSVSVPRMVINVHEAGRNFTVACQHRSNSEIICCTTPSLQQLNLQLPLKTKAFFMLDGILSKYFDLIYVHNPVFKPFEKPVMISMGNENVLEIKGNDIDPEAVKGEVLKVGNKSCENIHLHSEAVLCTVPNDLLKLNSELNIEWKQAISSTVLGKVIVQPDQNFTGLIAGVVSISTALLLLLGFFLWLKKRKQIKDLGSELVRYDARVHTPHLDRLVSARSVSPTTEMVSNESVDYRATFPEDQFPNSSQNGSCRQVQYPLTDMSPILTSGDSDISSPLLQNTVHIDLSALNPELVQAVQHVVIGPSSLIVHFNEVIGRGHFGCVYHGTLLDNDGKKIHCAVKSLNRITDIGEVSQFLTEGIIMKDFSHPNVLSLLGICLRSEGSPLVVLPYMKHGDLRNFIRNETHNPTVKDLIGFGLQVAKGMKYLASKKFVHRDLAARNCMLDEKFTVKVADFGLARDMYDKEYYSVHNKTGAKLPVKWMALESLQTQKFTTKSDVWSFGVLLWELMTRGAPPYPDVNTFDITVYLLQGRRLLQPEYCPDPLYEVMLKCWHPKAEMRPSFSELVSRISAIFSTFIGEHYVHVNATYVNVKCVAPYPSLLSSEDNADDEVDTRPASFWETS

SEQ ID NO: 861 - protein, 1408 aa, Homo sapiens
MKAPAVLAPGILVLLFTLVQRSNGECKEALAKSEMNVNMKYQLPNFTAETPIQNVILHEHHIFLGATNYIYVLNEEDLQKVAEYKTGPVLEHPDCFPCQDCSSKANLSGGVWKDNINMALVVDTYYDDQLISCGSVNRGTCQRHVFPHNHTADIQSEVHCIFSPQIEEPSQCPDCVVSALGAKVLSSVKDRFINFFVGNTINSSYFPDHPLHSISVRRLKETKDGFMFLTDQSYIDVLPEFRDSYPIKYVHAFESNNFIYFLTVQRETLDAQTFHTRIIRFCSINSGLHSYMEMPLECILTEKRKKRSTKKEVFNILQAAYVSKPGAQLARQIGASLNDDILFGVFAQSKPDSAEPMDRSAMCAFPIKYVNDFFNKIVNKNNVRCLQHFYGPNHEHCFNRTLLRNSSGCEARRDEYRTEFTTALQRVDLFMGQFSEVLLTSISTFIKGDLTIANLGTSEGRFMQVVVSRSGPSTPHVNFLLDSHPVSPEVIVEHTLNQNGYTLVITGKKITKIPLNGLGCRHFQSCSQCLSAPPFVQCGWCHDKCVRSEECLSGTWTQQICLPAIYKVFPNSAPLEGGTRLTICGWDFGFRRNNKFDLKKTRVLLGNESCTLTLSESTMNTLKCTVGPAMNKHFNMSIIISNGHGTTQYSTFSYVDPVITSISPKYGPMAGGTLLTLTGNYLNSGNSRHISIGGKTCTLKSVSNSILECYTPAQTISTEFAVKLKIDLANRETSIFSYREDPIVYEIHPTKSFISTWWKEPLNIVSFLFCFASGGSTITGVGKNLNSVSVPRMVINVHEAGRNFTVACQHRSNSEIICCTTPSLQQLNLQLPLKTKAFFMLDGILSKYFDLIYVHNPVFKPFEKPVMISMGNENVLEIKGNDIDPEAVKGEVLKVGNKSCENIHLHSEAVLCTVPNDLLKLNSELNIEWKQAISSTVLGKVIVQPDQNFTGLIAGVVSISTALLLLLGFFLWLKKRKQIKDLGSELVRYDARVHTPHLDRLVSARSVSPTTEMVSNESVDYRATFPEDQFPNSSQNGSCRQVQYPLTDMSPILTSGDSDISSPLLQNTVHIDLSALNPELVQAVQHVVIGPSSLIVHFNEVIGRGHFGCVYHGTLLDNDGKKIHCAVKSLNRITDIGEVSQFLTEGIIMKDFSHPNVLSLLGICLRSEGSPLVVLPYMKHGDLRNFIRNETHNPTVKDLIGFGLQVAKGMKYLASKKFVHRDLAARNCMLDEKFTVKVADFGLARDMYDKEYYSVHNKTGAKLPVKWMALESLQTQKFTTKSDVWSFGVLLWELMTRGAPPYPDVNTFDITVYLLQGRRLLQPEYCPDPLYEVMLKCWHPKAEMRPSFSELVSRISAIFSTFIGEHYVHVNATYVNVKCVAPYPSLLSSEDNADDEVDTRPASFWETS

SEQ ID NO: 862 - protein, 764 aa, Homo sapiens
MKAPAVLAPGILVLLFTLVQRSNGECKEALAKSEMNVNMKYQLPNFTAETPIQNVILHEHHIFLGATNYIYVLNEEDLQKVAEYKTGPVLEHPDCFPCQDCSSKANLSGGVWKDNINMALVVDTYYDDQLISCGSVNRGTCQRHVFPHNHTADIQSEVHCIFSPQIEEPSQCPDCVVSALGAKVLSSVKDRFINFFVGNTINSSYFPDHPLHSISVRRLKETKDGFMFLTDQSYIDVLPEFRDSYPIKYVHAFESNNFIYFLTVQRETLDAQTFHTRIIRFCSINSGLHSYMEMPLECILTEKRKKRSTKKEVFNILQAAYVSKPGAQLARQIGASLNDDILFGVFAQSKPDSAEPMDRSAMCAFPIKYVNDFFNKIVNKNNVRCLQHFYGPNHEHCFNRTLLRNSSGCEARRDEYRTEFTTALQRVDLFMGQFSEVLLTSISTFIKGDLTIANLGTSEGRFMQVVVSRSGPSTPHVNFLLDSHPVSPEVIVEHTLNQNGYTLVITGKKITKIPLNGLGCRHFQSCSQCLSAPPFVQCGWCHDKCVRSEECLSGTWTQQICLPAIYKVFPNSAPLEGGTRLTICGWDFGFRRNNKFDLKKTRVLLGNESCTLTLSESTMNTLKCTVGPAMNKHFNMSIIISNGHGTTQYSTFSYVDPVITSISPKYGPMAGGTLLTLTGNYLNSGNSRHISIGGKTCTLKSVSNSILECYTPAQTISTEFAVKLKIDLANRETSIFSYREDPIVYEIHPTKSFIRHVNIALIQR

SEQ ID NO: 863 - protein, 1342 aa, Homo sapiens
MRANDALQVLGLLFSLARGSEVGNSQAVCPGTLNGLSVTGDAENQYQTLYKLYERCEVVMGNLEIVLTGHNADLSFLQWIREVTGYVLVAMNEFSTLPLPNLRVVRGTQVYDGKFAIFVMLNYNTNSSHALRQLRLTQLTEILSGGVYIEKNDKLCHMDTIDWRDIVRDRDAEIVVKDNGRSCPPCHEVCKGRCWGPGSEDCQTLTKTICAPQCNGHCFGPNPNQCCHDECAGGCSGPQDTDCFACRHFNDSGACVPRCPQPLVYNKLTFQLEPNPHTKYQYGGVCVASCPHNFVVDQTSCVRACPPDKMEVDKNGLKMCEPCGGLCPKACEGTGSGSRFQTVDSSNIDGFVNCTKILGNLDFLITGLNGDPWHKIPALDPEKLNVFRTVREITGYLNIQSWPPHMHNFSVFSNLTTIGGRSLYNRGFSLLIMKNLNVTSLGFRSLKEISAGRIYISANRQLCYHHSLNWTKVLRGPTEERLDIKHNRPRRDCVAEGKVCDPLCSSGGCWGPGPGQCLSCRNYSRGGVCVTHCNFLNGEPREFAHEAECFSCHPECQPMEGTATCNGSGSDTCAQCAHFRDGPHCVSSCPHGVLGAKGPIYKYPDVQNECRPCHENCTQGCKGPELQDCLGQTLVLIGKTHLTMALTVIAGLVVIFMMLGGTFLYWRGRRIQNKRAMRRYLERGESIEPLDPSEKANKVLARIFKETELRKLKVLGSGVFGTVHKGVWIPEGESIKIPVCIKVIEDKSGRQSFQAVTDHMLAIGSLDHAHIVRLLGLCPGSSLQLVTQYLPLGSLLDHVRQHRGALGPQLLLNWGVQIAKGMYYLEEHGMVHRNLAARNVLLKSPSQVQVADFGVADLLPPDDKQLLYSEAKTPIKWMALESIHFGKYTHQSDVWSYGVTVWELMTFGAEPYAGLRLAEVPDLLEKGERLAQPQICTIDVYMVMVKCWMIDENIRPTFKELANEFTRMARDPPRYLVIKRESGPGIAPGPEPHGLTNKKLEEVELEPELDLDLDLEAEEDNLATTTLGSALSLPVGTLNRPRGSQSLLSPSSGYMPMNQGNLGESCQESAVSGSSERCPRPVSLHPMPRGCLASESSEGHVTGSEAELQEKVSMCRSRSRSRSPRPRGDSAYHSQRHSLLTPVTPLSPPGLEEEDVNGYVMPDTHLKGTPSSREGTLSSVGLSSVLGTEEEDEDEEYEYMNRRRRHSPPHPPRPSSLEELGYEYMDVGSDLSASLGSTQSCPLHPVPIMPTAGTTPDEDYEYMNRQRDGGGPGGDYAAMGACPASEQGYEEMRAFQGPGHQAPHVHYARLKTLRSLEATDSAFDNPDYWHSRLFPKANAQRT

SEQ ID NO: 864 - protein, 183 aa, Homo sapiens
MRANDALQVLGLLFSLARGSEVGNSQAVCPGTLNGLSVTGDAENQYQTLYKLYERCEVVMGNLEIVLTGHNADLSFLQWIREVTGYVLVAMNEFSTLPLPNLRVVRGTQVYDGKFAIFVMLNYNTNSSHALRQLRLTQLTGQFPMVPSGLTPQPAQDWYLLDDDPRLLTLSASSKVPVTLAAV

SEQ ID NO: 865 - protein, 331 aa, Homo sapiens
MRANDALQVLGLLFSLARGSEVGNSQAVCPGTLNGLSVTGDAENQYQTLYKLYERCEVVMGNLEIVLTGHNADLSFLQWIREVTGYVLVAMNEFSTLPLPNLRVVRGTQVYDGKFAIFVMLNYNTNSSHALRQLRLTQLTEILSGGVYIEKNDKLCHMDTIDWRDIVRDRDAEIVVKDNGRSCPPCHEVCKGRCWGPGSEDCQTLTKTICAPQCNGHCFGPNPNQCCHDECAGGCSGPQDTDCFACRHFNDSGACVPRCPQPLVYNKLTFQLEPNPHTKYQYGGVCVASCPHNFVVDQTSCVRACPPDKMEVDKNGLKMCEPCGGLCPKAF

SEQ ID NO: 866 - protein, 1283 aa, Homo sapiens
MGNLEIVLTGHNADLSFLQWIREVTGYVLVAMNEFSTLPLPNLRVVRGTQVYDGKFAIFVMLNYNTNSSHALRQLRLTQLTEILSGGVYIEKNDKLCHMDTIDWRDIVRDRDAEIVVKDNGRSCPPCHEVCKGRCWGPGSEDCQTLTKTICAPQCNGHCFGPNPNQCCHDECAGGCSGPQDTDCFACRHFNDSGACVPRCPQPLVYNKLTFQLEPNPHTKYQYGGVCVASCPHNFVVDQTSCVRACPPDKMEVDKNGLKMCEPCGGLCPKACEGTGSGSRFQTVDSSNIDGFVNCTKILGNLDFLITGLNGDPWHKIPALDPEKLNVFRTVREITGYLNIQSWPPHMHNFSVFSNLTTIGGRSLYNRGFSLLIMKNLNVTSLGFRSLKEISAGRIYISANRQLCYHHSLNWTKVLRGPTEERLDIKHNRPRRDCVAEGKVCDPLCSSGGCWGPGPGQCLSCRNYSRGGVCVTHCNFLNGEPREFAHEAECFSCHPECQPMEGTATCNGSGSDTCAQCAHFRDGPHCVSSCPHGVLGAKGPIYKYPDVQNECRPCHENCTQGCKGPELQDCLGQTLVLIGKTHLTMALTVIAGLVVIFMMLGGTFLYWRGRRIQNKRAMRRYLERGESIEPLDPSEKANKVLARIFKETELRKLKVLGSGVFGTVHKGVWIPEGESIKIPVCIKVIEDKSGRQSFQAVTDHMLAIGSLDHAHIVRLLGLCPGSSLQLVTQYLPLGSLLDHVRQHRGALGPQLLLNWGVQIAKGMYYLEEHGMVHRNLAARNVLLKSPSQVQVADFGVADLLPPDDKQLLYSEAKTPIKWMALESIHFGKYTHQSDVWSYGVTVWELMTFGAEPYAGLRLAEVPDLLEKGERLAQPQICTIDVYMVMVKCWMIDENIRPTFKELANEFTRMARDPPRYLVIKRESGPGIAPGPEPHGLTNKKLEEVELEPELDLDLDLEAEEDNLATTTLGSALSLPVGTLNRPRGSQSLLSPSSGYMPMNQGNLGESCQESAVSGSSERCPRPVSLHPMPRGCLASESSEGHVTGSEAELQEKVSMCRSRSRSRSPRPRGDSAYHSQRHSLLTPVTPLSPPGLEEEDVNGYVMPDTHLKGTPSSREGTLSSVGLSSVLGTEEEDEDEEYEYMNRRRRHSPPHPPRPSSLEELGYEYMDVGSDLSASLGSTQSCPLHPVPIMPTAGTTPDEDYEYMNRQRDGGGPGGDYAAMGACPASEQGYEEMRAFQGPGHQAPHVHYARLKTLRSLEATDSAFDNPDYWHSRLFPKANAQRT

SEQ ID NO: 867 - protein, 699 aa, Homo sapiens
MALTVIAGLVVIFMMLGGTFLYWRGRRIQNKRAMRRYLERGESIEPLDPSEKANKVLARIFKETELRKLKVLGSGVFGTVHKGVWIPEGESIKIPVCIKVIEDKSGRQSFQAVTDHMLAIGSLDHAHIVRLLGLCPGSSLQLVTQYLPLGSLLDHVRQHRGALGPQLLLNWGVQIAKGMYYLEEHGMVHRNLAARNVLLKSPSQVQVADFGVADLLPPDDKQLLYSEAKTPIKWMALESIHFGKYTHQSDVWSYGVTVWELMTFGAEPYAGLRLAEVPDLLEKGERLAQPQICTIDVYMVMVKCWMIDENIRPTFKELANEFTRMARDPPRYLVIKRESGPGIAPGPEPHGLTNKKLEEVELEPELDLDLDLEAEEDNLATTTLGSALSLPVGTLNRPRGSQSLLSPSSGYMPMNQGNLGESCQESAVSGSSERCPRPVSLHPMPRGCLASESSEGHVTGSEAELQEKVSMCRSRSRSRSPRPRGDSAYHSQRHSLLTPVTPLSPPGLEEEDVNGYVMPDTHLKGTPSSREGTLSSVGLSSVLGTEEEDEDEEYEYMNRRRRHSPPHPPRPSSLEELGYEYMDVGSDLSASLGSTQSCPLHPVPIMPTAGTTPDEDYEYMNRQRDGGGPGGDYAAMGACPASEQGYEEMRAFQGPGHQAPHVHYARLKTLRSLEATDSAFDNPDYWHSRLFPKANAQRT

SEQ ID NO: 868 - protein, 1255 aa, Homo sapiens
MTPGTQSPFFLLLLLTVLTVVTGSGHASSTPGGEKETSATQRSSVPSSTEKNAVSMTSSVLSSHSPGSGSSTTQGQDVTLAPATEPASGSAATWGQDVTSVPVTRPALGSTTPPAHDVTSAPDNKPAPGSTAPPAHGVTSAPDTRPAPGSTAPPAHGVTSAPDTRPAPGSTAPPAHGVTSAPDTRPAPGSTAPPAHGVTSAPDTRPAPGSTAPPAHGVTSAPDTRPAPGSTAPPAHGVTSAPDTRPAPGSTAPPAHGVTSAPDTRPAPGSTAPPAHGVTSAPDTRPAPGSTAPPAHGVTSAPDTRPAPGSTAPPAHGVTSAPDTRPAPGSTAPPAHGVTSAPDTRPAPGSTAPPAHGVTSAPDTRPAPGSTAPPAHGVTSAPDTRPAPGSTAPPAHGVTSAPDTRPAPGSTAPPAHGVTSAPDTRPAPGSTAPPAHGVTSAPDTRPAPGSTAPPAHGVTSAPDTRPAPGSTAPPAHGVTSAPDTRPAPGSTAPPAHGVTSAPDTRPAPGSTAPPAHGVTSAPDTRPAPGSTAPPAHGVTSAPDTRPAPGSTAPPAHGVTSAPDTRPAPGSTAPPAHGVTSAPDTRPAPGSTAPPAHGVTSAPDTRPAPGSTAPPAHGVTSAPDTRPAPGSTAPPAHGVTSAPDTRPAPGSTAPPAHGVTSAPDTRPAPGSTAPPAHGVTSAPDTRPAPGSTAPPAHGVTSAPDTRPAPGSTAPPAHGVTSAPDTRPAPGSTAPPAHGVTSAPDTRPAPGSTAPPAHGVTSAPDTRPAPGSTAPPAHGVTSAPDTRPAPGSTAPPAHGVTSAPDTRPAPGSTAPPAHGVTSAPDTRPAPGSTAPPAHGVTSAPDTRPAPGSTAPPAHGVTSAPDTRPAPGSTAPPAHGVTSAPDTRPAPGSTAPPAHGVTSAPDTRPAPGSTAPPAHGVTSAPDTRPAPGSTAPPAHGVTSAPDNRPALGSTAPPVHNVTSASGSASGSASTLVHNGTSARATTTPASKSTPFSIPSHHSDTPTTLASHSTKTDASSTHHSSVPPLTSSNHSTSPQLSTGVSFFFLSFHISNLQFNSSLEDPSTDYYQELQRDISEMFLQIYKQGGFLGLSNIKFRPGSVVVQLTLAFREGTINVHDVETQFNQYKTEAASRYNLTISDVSVSDVPFPFSAQSGAGVPGWGIALLVLVCVLVALAIVYLIALAVCQCRRKNYGQLDIFPARDTYHPMSEYPTYHTHGRYVPPSSTDRSPYEKVSAGNGGSSLSYTNPAVAATSANL

SEQ ID NO: 869 - protein, 1264 aa, Homo sapiens
MTPGTQSPFFLLLLLTVLTATTAPKPATVVTGSGHASSTPGGEKETSATQRSSVPSSTEKNAVSMTSSVLSSHSPGSGSSTTQGQDVTLAPATEPASGSAATWGQDVTSVPVTRPALGSTTPPAHDVTSAPDNKPAPGSTAPPAHGVTSAPDTRPAPGSTAPPAHGVTSAPDTRPAPGSTAPPAHGVTSAPDTRPAPGSTAPPAHGVTSAPDTRPAPGSTAPPAHGVTSAPDTRPAPGSTAPPAHGVTSAPDTRPAPGSTAPPAHGVTSAPDTRPAPGSTAPPAHGVTSAPDTRPAPGSTAPPAHGVTSAPDTRPAPGSTAPPAHGVTSAPDTRPAPGSTAPPAHGVTSAPDTRPAPGSTAPPAHGVTSAPDTRPAPGSTAPPAHGVTSAPDTRPAPGSTAPPAHGVTSAPDTRPAPGSTAPPAHGVTSAPDTRPAPGSTAPPAHGVTSAPDTRPAPGSTAPPAHGVTSAPDTRPAPGSTAPPAHGVTSAPDTRPAPGSTAPPAHGVTSAPDTRPAPGSTAPPAHGVTSAPDTRPAPGSTAPPAHGVTSAPDTRPAPGSTAPPAHGVTSAPDTRPAPGSTAPPAHGVTSAPDTRPAPGSTAPPAHGVTSAPDTRPAPGSTAPPAHGVTSAPDTRPAPGSTAPPAHGVTSAPDTRPAPGSTAPPAHGVTSAPDTRPAPGSTAPPAHGVTSAPDTRPAPGSTAPPAHGVTSAPDTRPAPGSTAPPAHGVTSAPDTRPAPGSTAPPAHGVTSAPDTRPAPGSTAPPAHGVTSAPDTRPAPGSTAPPAHGVTSAPDTRPAPGSTAPPAHGVTSAPDTRPAPGSTAPPAHGVTSAPDTRPAPGSTAPPAHGVTSAPDTRPAPGSTAPPAHGVTSAPDTRPAPGSTAPPAHGVTSAPDTRPAPGSTAPPAHGVTSAPDTRPAPGSTAPPAHGVTSAPDTRPAPGSTAPPAHGVTSAPDNRPALGSTAPPVHNVTSASGSASGSASTLVHNGTSARATTTPASKSTPFSIPSHHSDTPTTLASHSTKTDASSTHHSSVPPLTSSNHSTSPQLSTGVSFFFLSFHISNLQFNSSLEDPSTDYYQELQRDISEMFLQIYKQGGFLGLSNIKFRPGSVVVQLTLAFREGTINVHDVETQFNQYKTEAASRYNLTISDVSVSDVPFPFSAQSGAGVPGWGIALLVLVCVLVALAIVYLIALAVCQCRRKNYGQLDIFPARDTYHPMSEYPTYHTHGRYVPPSSTDRSPYEKVSAGNGGSSLSYTNPAVAATSANL

SEQ ID NO: 870 - protein, 1252 aa, Homo sapiens
MTPGTQSPFFLLLLLTVLTGSGHASSTPGGEKETSATQRSSVPSSTEKNAVSMTSSVLSSHSPGSGSSTTQGQDVTLAPATEPASGSAATWGQDVTSVPVTRPALGSTTPPAHDVTSAPDNKPAPGSTAPPAHGVTSAPDTRPAPGSTAPPAHGVTSAPDTRPAPGSTAPPAHGVTSAPDTRPAPGSTAPPAHGVTSAPDTRPAPGSTAPPAHGVTSAPDTRPAPGSTAPPAHGVTSAPDTRPAPGSTAPPAHGVTSAPDTRPAPGSTAPPAHGVTSAPDTRPAPGSTAPPAHGVTSAPDTRPAPGSTAPPAHGVTSAPDTRPAPGSTAPPAHGVTSAPDTRPAPGSTAPPAHGVTSAPDTRPAPGSTAPPAHGVTSAPDTRPAPGSTAPPAHGVTSAPDTRPAPGSTAPPAHGVTSAPDTRPAPGSTAPPAHGVTSAPDTRPAPGSTAPPAHGVTSAPDTRPAPGSTAPPAHGVTSAPDTRPAPGSTAPPAHGVTSAPDTRPAPGSTAPPAHGVTSAPDTRPAPGSTAPPAHGVTSAPDTRPAPGSTAPPAHGVTSAPDTRPAPGSTAPPAHGVTSAPDTRPAPGSTAPPAHGVTSAPDTRPAPGSTAPPAHGVTSAPDTRPAPGSTAPPAHGVTSAPDTRPAPGSTAPPAHGVTSAPDTRPAPGSTAPPAHGVTSAPDTRPAPGSTAPPAHGVTSAPDTRPAPGSTAPPAHGVTSAPDTRPAPGSTAPPAHGVTSAPDTRPAPGSTAPPAHGVTSAPDTRPAPGSTAPPAHGVTSAPDTRPAPGSTAPPAHGVTSAPDTRPAPGSTAPPAHGVTSAPDTRPAPGSTAPPAHGVTSAPDTRPAPGSTAPPAHGVTSAPDTRPAPGSTAPPAHGVTSAPDTRPAPGSTAPPAHGVTSAPDTRPAPGSTAPPAHGVTSAPDTRPAPGSTAPPAHGVTSAPDNRPALGSTAPPVHNVTSASGSASGSASTLVHNGTSARATTTPASKSTPFSIPSHHSDTPTTLASHSTKTDASSTHHSSVPPLTSSNHSTSPQLSTGVSFFFLSFHISNLQFNSSLEDPSTDYYQELQRDISEMFLQIYKQGGFLGLSNIKFRPGSVVVQLTLAFREGTINVHDVETQFNQYKTEAASRYNLTISDVSVSDVPFPFSAQSGAGVPGWGIALLVLVCVLVALAIVYLIALAVCQCRRKNYGQLDIFPARDTYHPMSEYPTYHTHGRYVPPSSTDRSPYEKVSAGNGGSSLSYTNPAVAATSANL

SEQ ID NO: 871 - protein, 1243 aa, Homo sapiens
MTPGTQSPFFLLLLLTVLTGGEKETSATQRSSVPSSTEKNAVSMTSSVLSSHSPGSGSSTTQGQDVTLAPATEPASGSAATWGQDVTSVPVTRPALGSTTPPAHDVTSAPDNKPAPGSTAPPAHGVTSAPDTRPAPGSTAPPAHGVTSAPDTRPAPGSTAPPAHGVTSAPDTRPAPGSTAPPAHGVTSAPDTRPAPGSTAPPAHGVTSAPDTRPAPGSTAPPAHGVTSAPDTRPAPGSTAPPAHGVTSAPDTRPAPGSTAPPAHGVTSAPDTRPAPGSTAPPAHGVTSAPDTRPAPGSTAPPAHGVTSAPDTRPAPGSTAPPAHGVTSAPDTRPAPGSTAPPAHGVTSAPDTRPAPGSTAPPAHGVTSAPDTRPAPGSTAPPAHGVTSAPDTRPAPGSTAPPAHGVTSAPDTRPAPGSTAPPAHGVTSAPDTRPAPGSTAPPAHGVTSAPDTRPAPGSTAPPAHGVTSAPDTRPAPGSTAPPAHGVTSAPDTRPAPGSTAPPAHGVTSAPDTRPAPGSTAPPAHGVTSAPDTRPAPGSTAPPAHGVTSAPDTRPAPGSTAPPAHGVTSAPDTRPAPGSTAPPAHGVTSAPDTRPAPGSTAPPAHGVTSAPDTRPAPGSTAPPAHGVTSAPDTRPAPGSTAPPAHGVTSAPDTRPAPGSTAPPAHGVTSAPDTRPAPGSTAPPAHGVTSAPDTRPAPGSTAPPAHGVTSAPDTRPAPGSTAPPAHGVTSAPDTRPAPGSTAPPAHGVTSAPDTRPAPGSTAPPAHGVTSAPDTRPAPGSTAPPAHGVTSAPDTRPAPGSTAPPAHGVTSAPDTRPAPGSTAPPAHGVTSAPDTRPAPGSTAPPAHGVTSAPDTRPAPGSTAPPAHGVTSAPDTRPAPGSTAPPAHGVTSAPDTRPAPGSTAPPAHGVTSAPDTRPAPGSTAPPAHGVTSAPDNRPALGSTAPPVHNVTSASGSASGSASTLVHNGTSARATTTPASKSTPFSIPSHHSDTPTTLASHSTKTDASSTHHSSVPPLTSSNHSTSPQLSTGVSFFFLSFHISNLQFNSSLEDPSTDYYQELQRDISEMFLQIYKQGGFLGLSNIKFRPGSVVVQLTLAFREGTINVHDVETQFNQYKTEAASRYNLTISDVSVSDVPFPFSAQSGAGVPGWGIALLVLVCVLVALAIVYLIALAVCQCRRKNYGQLDIFPARDTYHPMSEYPTYHTHGRYVPPSSTDRSPYEKVSAGNGGSSLSYTNPAVAATSANL

SEQ ID NO: 872 - protein, 1087 aa, Homo sapiens
MTPGTQSPFFLLLLLTVLTVVTGSGHASSTPGGEKETSATQRSSVPSSTEKNAVSMTSSVLSSHSPGSGSSTTQGQDVTLAPATEPASGSAATWGQDVTSVPVTRPALGSTTPPAHDVTSAPDNKPAPGSTAPPAHGVTSAPDTRPAPGSTAPPAHGVTSAPDTRPAPGSTAPPAHGVTSAPDTRPAPGSTAPPAHGVTSAPDTRPAPGSTAPPAHGVTSAPDTRPAPGSTAPPAHGVTSAPDTRPAPGSTAPPAHGVTSAPDTRPAPGSTAPPAHGVTSAPDTRPAPGSTAPPAHGVTSAPDTRPAPGSTAPPAHGVTSAPDTRPAPGSTAPPAHGVTSAPDTRPAPGSTAPPAHGVTSAPDTRPAPGSTAPPAHGVTSAPDTRPAPGSTAPPAHGVTSAPDTRPAPGSTAPPAHGVTSAPDTRPAPGSTAPPAHGVTSAPDTRPAPGSTAPPAHGVTSAPDTRPAPGSTAPPAHGVTSAPDTRPAPGSTAPPAHGVTSAPDTRPAPGSTAPPAHGVTSAPDTRPAPGSTAPPAHGVTSAPDTRPAPGSTAPPAHGVTSAPDTRPAPGSTAPPAHGVTSAPDTRPAPGSTAPPAHGVTSAPDTRPAPGSTAPPAHGVTSAPDTRPAPGSTAPPAHGVTSAPDTRPAPGSTAPPAHGVTSAPDTRPAPGSTAPPAHGVTSAPDTRPAPGSTAPPAHGVTSAPDTRPAPGSTAPPAHGVTSAPDTRPAPGSTAPPAHGVTSAPDTRPAPGSTAPPAHGVTSAPDTRPAPGSTAPPAHGVTSAPDTRPAPGSTAPPAHGVTSAPDTRPAPGSTAPPAHGVTSAPDTRPAPGSTAPPAHGVTSAPDTRPAPGSTAPPAHGVTSAPDTRPAPGSTAPPAHGVTSAPDTRPAPGSTAPPAHGVTSAPDTRPAPGSTAPPAHGVTSAPDTRPAPGSTAPPAHGVTSAPDNRPALGSTAPPVHNVTSASGSASGSASTLVHNGTSARATTTPASKSTPFSIPSHHSDTPTTLASHSTKTDASSTHHSSVPPLTSSNHSTSPQLSTGVSFFFLSFHISNLQFNSSLEDPSTDYYQELQRDISEMVSIGLSFPMLP

SEQ ID NO: 873 - protein, 230 aa, Homo sapiens
MTPGTQSPFFLLLLLTVLTVVTGSGHASSTPGGEKETSATQRSSVPSSTEKNAIPAPTTTKSCRETFLKWPGSVVVQLTLAFREGTINVHDVETQFNQYKTEAASRYNLTISDVSVSDVPFPFSAQSGAGVPGWGIALLVLVCVLVALAIVYLIALAVCQCRRKNYGQLDIFPARDTYHPMSEYPTYHTHGRYVPPSSTDRSPYEKVSAGNGGSSLSYTNPAVAATSANL

SEQ ID NO: 874 - protein, 255 aa, Homo sapiens
MTPGTQSPFFLLLLLTVLTVVTGSGHASSTPGGEKETSATQRSSVPSSTEKNAFNSSLEDPSTDYYQELQRDISEMFLQIYKQGGFLGLSNIKFRPGSVVVQLTLAFREGTINVHDVETQFNQYKTEAASRYNLTISDVSVSDVPFPFSAQSGAGVPGWGIALLVLVCVLVALAIVYLIALAVCQCRRKNYGQLDIFPARDTYHPMSEYPTYHTHGRYVPPSSTDRSPYEKVSAGNGGSSLSYTNPAVAATSANL

SEQ ID NO: 875 - protein, 273 aa, Homo sapiens
MTPGTQSPFFLLLLLTVLTVVTGSGHASSTPGGEKETSATQRSSVPSSTEKNALSTGVSFFFLSFHISNLQFNSSLEDPSTDYYQELQRDISEMFLQIYKQGGFLGLSNIKFRPGSVVVQLTLAFREGTINVHDVETQFNQYKTEAASRYNLTISDVSVSDVPFPFSAQSGAGVPGWGIALLVLVCVLVALAIVYLIALAVCQCRRKNYGQLDIFPARDTYHPMSEYPTYHTHGRYVPPSSTDRSPYEKVSAGNGGSSLSYTNPAVAATSANL

SEQ ID NO: 876 - protein, 168 aa, Homo sapiens
MTPGTQSPFFLLLLLTVLTVVTGSGHASSTPGGEKETSATQRSSVPSSTEKNALSTGVSFFFLSFHISNLQFNSSLEDPSTDYYQELQRDISEMAVCQCRRKNYGQLDIFPARDTYHPMSEYPTYHTHGRYVPPSSTDRSPYEKVSAGNGGSSLSYTNPAVAATSANL

SEQ ID NO: 877 - protein, 203 aa, Homo sapiens
MTPGTQSPFFLLLLLTVLTVVTGSGHASSTPGGEKETSATQRSSVPSSTEKNAIPAPTTTKSCRETFLKCFCRFINKGVFWASPILSSVSDVPFPFSAQSGAGVPGWGIALLVLVCVLVALAIVYLIALAVCQCRRKNYGQLDIFPARDTYHPMSEYPTYHTHGRYVPPSSTDRSPYEKVSAGNGGSSLSYTNPAVAATSANL

SEQ ID NO: 878 - protein, 264 aa, Homo sapiens
MTPGTQSPFFLLLLLTVLTATTAPKPATVVTGSGHASSTPGGEKETSATQRSSVPSSTEKNAFNSSLEDPSTDYYQELQRDISEMFLQIYKQGGFLGLSNIKFRPGSVVVQLTLAFREGTINVHDVETQFNQYKTEAASRYNLTISDVSVSDVPFPFSAQSGAGVPGWGIALLVLVCVLVALAIVYLIALAVCQCRRKNYGQLDIFPARDTYHPMSEYPTYHTHGRYVPPSSTDRSPYEKVSAGNGGSSLSYTNPAVAATSANL

SEQ ID NO: 879 - protein, 159 aa, Homo sapiens
MTPGTQSPFFLLLLLTVLTATTAPKPATVVTGSGHASSTPGGEKETSATQRSSVPSSTEKNAFNSSLEDPSTDYYQELQRDISEMAVCQCRRKNYGQLDIFPARDTYHPMSEYPTYHTHGRYVPPSSTDRSPYEKVSAGNGGSSLSYTNPAVAATSANL

SEQ ID NO: 880 - protein, 198 aa, Homo sapiens
MTPGTQSPFFLLLLLTVLTVVTGSGHASSTPGGEKETSATQRSSVPSSTEKNALSTGVSFFFLSFHISNLQFNSSLEDPSTDYYQELQRDISEMFLQIYKQGGFLGLSNIKFRPGSVVVQLTLAFREGTINVHDVETQFNQYKTEAASRYNLTISDVSGCLSVPPKELRAAGHLSSPGYLPSYERVPHLPHPWALCAP

SEQ ID NO: 881 - protein, 96 aa, Homo sapiens
MTPGTQSPFFLLLLLTVLTVVTGSGHASSTPGGEKETSATQRSSVPSSTEKNAIPAPTTTKSCRETFLKCFCRFINKGVFWASPILSSGQDLWWYN

SEQ ID NO: 882 - protein, 224 aa, Homo sapiens
MTPGTQSPFFLLLLLTVLTATTAPKPATVVTGSGHASSTPGGEKETSATQRSSVPSSTEKNAFRPGSVVVQLTLAFREGTINVHDVETQFNQYKTEAASRYNLTISDVSVSDVPFPFSAQSGAGVPGWGIALLVLVCVLVALAIVYLIALAVCQCRRKNYGQLDIFPARDTYHPMSEYPTYHTHGRYVPPSSTDRSPYEKVSAGNGGSSLSYTNPAVAATSANL

SEQ ID NO: 883 - protein, 166 aa, Homo sapiens
MTPGTQSPFFLLLLLTVLTATTAPKPATVVTGSGHASSTPGGEKETSATQRSSVPSSTEKNASGAGVPGWGIALLVLVCVLVALAIVYLIALAVCQCRRKNYGQLDIFPARDTYHPMSEYPTYHTHGRYVPPSSTDRSPYEKVSAGNGGSSLSYTNPAVAATSANL

SEQ ID NO: 884 - protein, 259 aa, Homo sapiens
MTPGTQSPFFLLLLLTVLTATTAPKPATVVTGSGHASSTPGGEKETSATQRSSVPSSTEKNAFNSSLEDPSTDYYQELQRDISEMFLQIYKQGGFLGLSNIKFRPGSVVVQLTLAFREGTINVHDVETQFNQYKTEAASRYNLTISDVSVSDVPFPFSAQSGAGVPGWGIALLVLVCVLVALAIVYLIALAVCQCRRKNYGQLDIFPARDTYHPMSEYPTYHTHGRYVPPSSTDRSPYEKRQNGWSTMPRGALPEESQG

SEQ ID NO: 885 - protein, 14507 aa, Homo sapiens
MLKPSGLPGSSSPTRSLMTGSRSTKATPEMDSGLTGATLSPKTSTGAIVVTEHTLPFTSPDKTLASPTSSVVGRTTQSLGVMSSALPESTSRGMTHSEQRTSPSLSPQVNGTPSRNYPATSMVSGLSSPRTRTSSTEGNFTKEASTYTLTVETTSGPVTEKYTVPTETSTTEGDSTETPWDTRYIPVKITSPMKTFADSTASKENAPVSMTPAETTVTDSHTPGRTNPSFGTLYSSFLDLSPKGTPNSRGETSLELILSTTGYPFSSPEPGSAGHSRISTSAPLSSSASVLDNKISETSIFSGQSLTSPLSPGVPEARASTMPNSAIPFSMTLSNAETSAERVRSTISSLGTPSISTKQTAETILTFHAFAETMDIPSTHIAKTLASEWLGSPGTLGGTSTSALTTTSPSTTLVSEETNTHHSTSGKETEGTLNTSMTPLETSAPGEESEMTATLVPTLGFTTLDSKIRSPSQVSSSHPTRELRTTGSTSGRQSSSTAAHGSSDILRATTSSTSKASSWTSESTAQQFSEPQHTQWVETSPSMKTERPPASTSVAAPITTSVPSVVSGFTTLKTSSTKGIWLEETSADTLIGESTAGPTTHQFAVPTGISMTGGSSTRGSQGTTHLLTRATASSETSADLTLATNGVPVSVSPAVSKTAAGSSPPGGTKPSYTMVSSVIPETSSLQSSAFREGTSLGLTPLNTRHPFSSPEPDSAGHTKISTSIPLLSSASVLEDKVSATSTFSHHKATSSITTGTPEISTKTKPSSAVLSSMTLSNAATSPERVRNATSPLTHPSPSGEETAGSVLTLSTSAETTDSPNIHPTGTLTSESSESPSTLSLPSVSGVKTTFSSSTPSTHLFTSGEETEETSNPSVSQPETSVSRVRTTLASTSVPTPVFPTMDTWPTRSAQFSSSHLVSELRATSSTSVTNSTGSALPKISHLTGTATMSQTNRDTFNDSAAPQSTTWPETSPRFKTGLPSATTTVSTSATSLSATVMVSKFTSPATSSMEATSIREPSTTILTTETTNGPGSMAVASTNIPIGKGYITEGRLDTSHLPIGTTASSETSMDFTMAKESVSMSVSPSQSMDAAGSSTPGRTSQFVDTFSDDVYHLTSREITIPRDGTSSALTPQMTATHPPSPDPGSARSTWLGILSSSPSSPTPKVTMSSTFSTQRVTTSMIMDTVETSRWNMPNLPSTTSLTPSNIPTSGAIGKSTLVPLDTPSPATSLEASEGGLPTLSTYPESTNTPSIHLGAHASSESPSTIKLTMASVVKPGSYTPLTFPSIETHIHVSTARMAYSSGSSPEMTAPGETNTGSTWDPTTYITTTDPKDTSSAQVSTPHSVRTLRTTENHPKTESATPAAYSGSPKISSSPNLTSPATKAWTITDTTEHSTQLHYTKLAEKSSGFETQSAPGPVSVVIPTSPTIGSSTLELTSDVPGEPLVLAPSEQTTITLPMATWLSTSLTEEMASTDLDISSPSSPMSTFAIFPPMSTPSHELSKSEADTSAIRNTDSTTLDQHLGIRSLGRTGDLTTVPITPLTTTWTSVIEHSTQAQDTLSATMSPTHVTQSLKDQTSIPASASPSHLTEVYPELGTQGRSSSEATTFWKPSTDTLSREIETGPTNIQSTPPMDNTTTGSSSSGVTLGIAHLPIGTSSPAETSTNMALERRSSTATVSMAGTMGLLVTSAPGRSISQSLGRVSSVLSESTTEGVTDSSKGSSPRLNTQGNTALSSSLEPSYAEGSQMSTSIPLTSSPTTPDVEFIGGSTFWTKEVTTVMTSDISKSSARTESSSATLMSTALGSTENTGKEKLRTASMDLPSPTPSMEVTPWISLTLSNAPNTTDSLDLSHGVHTSSAGTLATDRSLNTGVTRASRLENGSDTSSKSLSMGNSTHTSMTYTEKSEVSSSIHPRPETSAPGAETTLTSTPGNRAISLTLPFSSIPVEEVISTGITSGPDINSAPMTHSPITPPTIVWTSTGTIEQSTQPLHAVSSEKVSVQTQSTPYVNSVAVSASPTHENSVSSGSSTSSPYSSASLESLDSTISRRNAITSWLWDLTTSLPTTTWPSTSLSEALSSGHSGVSNPSSTTTEFPLFSAASTSAAKQRNPETETHGPQNTAASTLNTDASSVTGLSETPVGASISSEVPLPMAITSRSDVSGLTSESTANPSLGTASSAGTKLTRTISLPTSESLVSFRMNKDPWTVSIPLGSHPTTNTETSIPVNSAGPPGLSTVASDVIDTPSDGAESIPTVSFSPSPDTEVTTISHFPEKTTHSFRTISSLTHELTSRVTPIPGDWMSSAMSTKPTGASPSITLGERRTITSAAPTTSPIVLTASFTETSTVSLDNETTVKTSDILDARKTNELPSDSSSSSDLINTSIASSTMDVTKTASISPTSISGMTASSSPSLFSSDRPQVPTSTTETNTATSPSVSSNTYSLDGGSNVGGTPSTLPPFTITHPVETSSALLAWSRPVRTFSTMVSTDTASGENPTSSNSVVTSVPAPGTWTSVGSTTDLPAMGFLKTSPAGEAHSLLASTIEPATAFTPHLSAAVVTGSSATSEASLLTTSESKAIHSSPQTPTTPTSGANWETSATPESLLVVTETSDTTLTSKILVTDTILFSTVSTPPSKFPSTGTLSGASFPTLLPDTPAIPLTATEPTSSLATSFDSTPLVTIASDSLGTVPETTLTMSETSNGDALVLKTVSNPDRSIPGITIQGVTESPLHPSSTSPSKIVAPRNTTYEGSITVALSTLPAGTTGSLVFSQSSENSETTALVDSSAGLERASVMPLTTGSQGMASSGGIRSGSTHSTGTKTFSSLPLTMNPGEVTAMSEITTNRLTATQSTAPKGIPVKPTSAESGLLTPVSASSSPSKAFASLTTAPPTWGIPQSTLTFEFSEVPSLDTKSASLPTPGQSLNTIPDSDASTASSSLSKSPEKNPRARMMTSTKAISASSFQSTGFTETPEGSASPSMAGHEPRVPTSGTGDPRYASESMSYPDPSKASSAMTSTSLASKLTTLFSTGQAARSGSSSSPISLSTEKETSFLSPTASTSRKTSLFLGPSMARQPNILVHLQTSALTLSPTSTLNMSQEEPPELTSSQTIAEEEGTTAETQTLTFTPSETPTSLLPVSSPTEPTARRKSSPETWASSISVPAKTSLVETTDGTLVTTIKMSSQAAQGNSTWPAPAEETGSSPAGTSPGSPEMSTTLKIMSSKEPSISPEIRSTVRNSPWKTPETTVPMETTVEPVTLQSTALGSGSTSISHLPTGTTSPTKSPTENMLATERVSLSPSPPEAWTNLYSGTPGGTRQSLATMSSVSLESPTARSITGTGQQSSPELVSKTTGMEFSMWHGSTGGTTGDTHVSLSTSSNILEDPVTSPNSVSSLTDKSKHKTETWVSTTAIPSTVLNNKIMAAEQQTSRSVDEAYSSTSSWSDQTSGSDITLGASPDVTNTLYITSTAQTTSLVSLPSGDQGITSLTNPSGGKTSSASSVTSPSIGLETLRANVSAVKSDIAPTAGHLSQTSSPAEVSILDVTTAPTPGISTTITTMGTNSISTTTPNPEVGMSTMDSTPATERRTTSTEHPSTWSSTAASDSWTVTDMTSNLKVARSPGTISTMHTTSFLASSTELDSMSTPHGRITVIGTSLVTPSSDASAVKTETSTSERTLSPSDTTASTPISTFSRVQRMSISVPDILSTSWTPSSTEAEDVPVSMVSTDHASTKTDPNTPLSTFLFDSLSTLDWDTGRSLSSATATTSAPQGATTPQELTLETMISPATSQLPFSIGHITSAVTPAAMARSSGVTFSRPDPTSKKAEQTSTQLPTTTSAHPGQVPRSAATTLDVIPHTAKTPDATFQRQGQTALTTEARATSDSWNEKEKSTPSAPWITEMMNSVSEDTIKEVTSSSSVLRTLNTLDINLESGTTSSPSWKSSPYERIAPSESTTDKEAIHPSTNTVETTGWVTSSEHASHSTIPAHSASSKLTSPVVTTSTREQAIVSMSTTTWPESTRARTEPNSFLTIELRDVSPYMDTSSTTQTSIISSPGSTAITKGPRTEITSSKRISSSFLAQSMRSSDSPSEAITRLSNFPAMTESGGMILAMQTSPPGATSLSAPTLDTSATASWTGTPLATTQRFTYSEKTTLFSKGPEDTSQPSPPSVEETSSSSSLVPIHATTSPSNILLTSQGHSPSSTPPVTSVFLSETSGLGKTTDMSRISLEPGTSLPPNLSSTAGEALSTYEASRDTKAIHHSADTAVTNMEATSSEYSPIPGHTKPSKATSPLVTSHIMGDITSSTSVFGSSETTEIETVSSVNQGLQERSTSQVASSATETSTVITHVSSGDATTHVTKTQATFSSGTSISSPHQFITSTNTFTDVSTNPSTSLIMTESSGVTITTQTGPTGAATQGPYLLDTSTMPYLTETPLAVTPDFMQSEKTTLISKGPKDVSWTSPPSVAETSYPSSLTPFLVTTIPPATSTLQGQHTSSPVSATSVLTSGLVKTTDMLNTSMEPVTNSPQNLNNPSNEILATLAATTDIETIHPSINKAVTNMGTASSAHVLHSTLPVSSEPSTATSPMVPASSMGDALASISIPGSETTDIEGEPTSSLTAGRKENSTLQEMNSTTESNIILSNVSVGAITEATKMEVPSFDATFIPTPAQSTKFPDIFSVASSRLSNSPPMTISTHMTTTQTGSSGATSKIPLALDTSTLETSAGTPSVVTEGFAHSKITTAMNNDVKDVSQTNPPFQDEASSPSSQAPVLVTTLPSSVAFTPQWHSTSSPVSMSSVLTSSLVKTAGKVDTSLETVTSSPQSMSNTLDDISVTSAATTDIETTHPSINTVVTNVGTTGSAFESHSTVSAYPEPSKVTSPNVTTSTMEDTTISRSIPKSSKTTRTETETTSSLTPKLRETSISQEITSSTETSTVPYKELTGATTEVSRTDVTSSSSTSFPGPDQSTVSLDISTETNTRLSTSPIMTESAEITITTQTGPHGATSQDTFTMDPSNTTPQAGIHSAMTHGFSQLDVTTLMSRIPQDVSWTSPPSVDKTSSPSSFLSSPAMTTPSLISSTLPEDKLSSPMTSLLTSGLVKITDILRTRLEPVTSSLPNFSSTSDKILATSKDSKDTKEIFPSINTEETNVKANNSGHESHSPALADSETPKATTQMVITTTVGDPAPSTSMPVHGSSETTNIKREPTYFLTPRLRETSTSQESSFPTDTSFLLSKVPTGTITEVSSTGVNSSSKISTPDHDKSTVPPDTFTGEIPRVFTSSIKTKSAEMTITTQASPPESASHSTLPLDTSTTLSQGGTHSTVTQGFPYSEVTTLMGMGPGNVSWMTTPPVEETSSVSSLMSSPAMTSPSPVSSTSPQSIPSSPLPVTALPTSVLVTTTDVLGTTSPESVTSSPPNLSSITHERPATYKDTAHTEAAMHHSTNTAVTNVGTSGSGHKSQSSVLADSETSKATPLMSTTSTLGDTSVSTSTPNISQTNQIQTEPTASLSPRLRESSTSEKTSSTTETNTAFSYVPTGAITQASRTEISSSRTSISDLDRPTIAPDISTGMITRLFTSPIMTKSAEMTVTTQTTTPGATSQGILPWDTSTTLFQGGTHSTVSQGFPHSEITTLRSRTPGDVSWMTTPPVEETSSGFSLMSPSMTSPSPVSSTSPESIPSSPLPVTALLTSVLVTTTNVLGTTSPEPVTSSPPNLSSPTQERLTTYKDTAHTEAMHASMHTNTAVANVGTSISGHESQSSVPADSHTSKATSPMGITFAMGDTSVSTSTPAFFETRIQTESTSSLIPGLRDTRTSEEINTVTETSTVLSEVPTTTTTEVSRTEVITSSRTTISGPDHSKMSPYISTETITRLSTFPFVTGSTEMAITNQTGPIGTISQATLTLDTSSTASWEGTHSPVTQRFPHSEETTTMSRSTKGVSWQSPPSVEETSSPSSPVPLPAITSHSSLYSAVSGSSPTSALPVTSLLTSGRRKTIDMLDTHSELVTSSLPSASSFSGEILTSEASTNTETIHFSENTAETNMGTTNSMHKLHSSVSIHSQPSGHTPPKVTGSMMEDAIVSTSTPGSPETKNVDRDSTSPLTPELKEDSTALVMNSTTESNTVFSSVSLDAATEVSRAEVTYYDPTFMPASAQSTKSPDISPEASSSHSNSPPLTISTHKTIATQTGPSGVTSLGQLTLDTSTIATSAGTPSARTQDFVDSETTSVMNNDLNDVLKTSPFSAEEANSLSSQAPLLVTTSPSPVTSTLQEHSTSSLVSVTSVPTPTLAKITDMDTNLEPVTRSPQNLRNTLATSEATTDTHTMHPSINTAVANVGTTSSPNEFYFTVSPDSDPYKATSAVVITSTSGDSIVSTSMPRSSAMKKIESETTFSLIFRLRETSTSQKIGSSSDTSTVFDKAFTAATTEVSRTELTSSSRTSIQGTEKPTMSPDTSTRSVTMLSTFAGLTKSEERTIATQTGPHRATSQGTLTWDTSITTSQAGTHSAMTHGFSQLDLSTLTSRVPEYISGTSPPSVEKTSSSSSLLSLPAITSPSPVPTTLPESRPSSPVHLTSLPTSGLVKTTDMLASVASLPPNLGSTSHKIPTTSEDIKDTEKMYPSTNIAVTNVGTTTSEKESYSSVPAYSEPPKVTSPMVTSFNIRDTIVSTSMPGSSEITRIEMESTFSLAHGLKGTSTSQDPIVSTEKSAVLHKLTTGATETSRTEVASSRRTSIPGPDHSTESPDISTEVIPSLPISLGITESSNMTIITRTGPPLGSTSQGTFTLDTPTTSSRAGTHSMATQEFPHSEMTTVMNKDPEILSWTIPPSIEKTSFSSSLMPSPAMTSPPVSSTLPKTIHTTPSPMTSLLTPSLVMTTDTLGTSPEPTTSSPPNLSSTSHEILTTDEDTTAIEAMHPSTSTAATNVETTSSGHGSQSSVLADSEKTKATAPMDTTSTMGHTTVSTSMSVSSETTKIKRESTYSLTPGLRETSISQNASFSTDTSIVLSEVPTGTTAEVSRTEVTSSGRTSIPGPSQSTVLPEISTRTMTRLFASPTMTESAEMTIPTQTGPSGSTSQDTLTLDTSTTKSQAKTHSTLTQRFPHSEMTTLMSRGPGDMSWQSSPSLENPSSLPSLLSLPATTSPPPISSTLPVTISSSPLPVTSLLTSSPVTTTDMLHTSPELVTSSPPKLSHTSDERLTTGKDTTNTEAVHPSTNTAASNVEIPSSGHESPSSALADSETSKATSPMFITSTQEDTTVAISTPHFLETSRIQKESISSLSPKLRETGSSVETSSAIETSAVLSEVSIGATTEISRTEVTSSSRTSISGSAESTMLPEISTTRKIIKFPTSPILAESSEMTIKTQTSPPGSTSESTFTLDTSTTPSLVITHSTMTQRLPHSEITTLVSRGAGDVPRPSSLPVEETSPPSSQLSLSAMISPSPVSSTLPASSHSSSASVTSLLTPGQVKTTEVLDASAEPETSSPPSLSSTSVEILATSEVTTDTEKIHPFSNTAVTKVGTSSSGHESPSSVLPDSETTKATSAMGTISIMGDTSVSTLTPALSNTRKIQSEPASSLTTRLRETSTSEETSLATEANTVLSKVSTGATTEVSRTEAISFSRTSMSGPEQSTMSQDISIGTIPRISASSVLTESAKMTITTQTGPSESTLESTLNLNTATTPSWVETHSIVIQGFPHPEMTTSMGRGPGGVSWPSPPFVKETSPPSSPLSLPAVTSPHPVSTTFLAHIPPSPLPVTSLLTSGPATTTDILGTSTEPGTSSSSSLSTTSHERLTTYKDTAHTEAVHPSTNTGGTNVATTSSGYKSQSSVLADSSPMCTTSTMGDTSVLTSTPAFLETRRIQTELASSLTPGLRESSGSEGTSSGTKMSTVLSKVPTGATTEISKEDVTSIPGPAQSTISPDISTRTVSWFSTSPVMTESAEITMNTHTSPLGATTQGTSTLDTSSTTSLTMTHSTISQGFSHSQMSTLMRRGPEDVSWMSPPLLEKTRPSFSLMSSPATTSPSPVSSTLPESISSSPLPVTSLLTSGLAKTTDMLHKSSEPVTNSPANLSSTSVEILATSEVTTDTEKTHPSSNRTVTDVGTSSSGHESTSFVLADSQTSKVTSPMVITSTMEDTSVSTSTPGFFETSRIQTEPTSSLTLGLRKTSSSEGTSLATEMSTVLSGVPTGATAEVSRTEVTSSSRTSISGFAQLTVSPETSTETITRLPTSSIMTESAEMMIKTQTDPPGSTPESTHTVDISTTPNWVETHSTVTQRFSHSEMTTLVSRSPGDMLWPSQSSVEETSSASSLLSLPATTSPSPVSSTLVEDFPSASLPVTSLLNPGLVITTDRMGISREPGTSSTSNLSSTSHERLTTLEDTVDTEDMQPSTHTAVTNVRTSISGHESQSSVLSDSETPKATSPMGTTYTMGETSVSISTSDFFETSRIQIEPTSSLTSGLRETSSSERISSATEGSTVLSEVPSGATTEVSRTEVISSRGTSMSGPDQFTISPDISTEAITRLSTSPIMTESAESAITIETGSPGATSEGTLTLDTSTTTFWSGTHSTASPGFSHSEMTTLMSRTPGDVPWPSLPSVEEASSVSSSLSSPAMTSTSFFSTLPESISSSPHPVTALLTLGPVKTTDMLRTSSEPETSSPPNLSSTSAEILATSEVTKDREKIHPSSNTPVVNVGTVIYKHLSPSSVLADLVTTKPTSPMATTSTLGNTSVSTSTPAFPETMMTQPTSSLTSGLREISTSQETSSATERSASLSGMPTGATTKVSRTEALSLGRTSTPGPAQSTISPEISTETITRISTPLTTTGSAEMTITPKTGHSGASSQGTFTLDTSSRASWPGTHSAATHRSPHSGMTTPMSRGPEDVSWPSRPSVEKTSPPSSLVSLSAVTSPSPLYSTPSESSHSSPLRVTSLFTPVMMKTTDMLDTSLEPVTTSPPSMNITSDESLATSKATMETEAIQLSENTAVTQMGTISARQEFYSSYPGLPEPSKVTSPVVTSSTIKDIVSTTIPASSEITRIEMESTSTLTPTPRETSTSQEIHSATKPSTVPYKALTSATIEDSMTQVMSSSRGPSPDQSTMSQDISTEVITRLSTSPIKTESTEMTITTQTGSPGATSRGTLTLDTSTTFMSGTHSTASQGFSHSQMTALMSRTPGDVPWLSHPSVEEASSASFSLSSPVMTSSSPVSSTLPDSIHSSSLPVTSLLTSGLVKTTELLGTSSEPETSSPPNLSSTSAEILAITEVTTDTEKLEMTNVVTSGYTHESPSSVLADSVTTKATSSMGITYPTGDTNVLTSTPAFSDTSRIQTKSKLSLTPGLMETSISEETSSATEKSTVLSSVPTGATTEVSRTEAISSSRTSIPGPAQSTMSSDTSMETITRISTPLTRKESTDMAITPKTGPSGATSQGTFTLDSSSTASWPGTHSATTQRFPQSVVTTPMSRGPEDVSWPSPLSVEKNSPPSSLVSSSSVTSPSPLYSTPSGSSHSSPVPVTSLFTSIMMKATDMLDASLEPETTSAPNMNITSDESLAASKATTETEAIHVFENTAASHVETTSATEELYSSSPGFSEPTKVISPVVTSSSIRDNMVSTTMPGSSGITRIEIESMSSLTPGLRETRTSQDITSSTETSTVLYKMPSGATPEVSRTEVMPSSRTSIPGPAQSTMSLDISDEVVTRLSTSPIMTESAEITITTQTGYSLATSQVTLPLGTSMTFLSGTHSTMSQGLSHSEMTNLMSRGPESLSWTSPRFVETTRSSSSLTSLPLTTSLSPVSSTLLDSSPSSPLPVTSLILPGLVKTTEVLDTSSEPKTSSSPNLSSTSVEIPATSEIMTDTEKIHPSSNTAVAKVRTSSSVHESHSSVLADSETTITIPSMGITSAVDDTTVFTSNPAFSETRRIPTEPTFSLTPGFRETSTSEETTSITETSAVLYGVPTSATTEVSMTEIMSSNRIHIPDSDQSTMSPDIITEVITRLSSSSMMSESTQMTITTQKSSPGATAQSTLTLATTTAPLARTHSTVPPRFLHSEMTTLMSRSPENPSWKSSLFVEKTSSSSSLLSLPVTTSPSVSSTLPQSIPSSSFSVTSLLTPGMVKTTDTSTEPGTSLSPNLSGTSVEILAASEVTTDTEKIHPSSSMAVTNVGTTSSGHELYSSVSIHSEPSKATYPVGTPSSMAETSISTSMPANFETTGFEAEPFSHLTSGFRKTNMSLDTSSVTPTNTPSSPGSTHLLQSSKTDFTSSAKTSSPDWPPASQYTEIPVDIITPFNASPSITESTGITSFPESRFTMSVTESTHHLSTDLLPSAETISTGTVMPSLSEAMTSFATTGVPRAISGSGSPFSRTESGPGDATLSTIAESLPSSTPVPFSSSTFTTTDSSTIPALHEITSSSATPYRVDTSLGTESSTTEGRLVMVSTLDTSSQPGRTSSSPILDTRMTESVELGTVTSAYQVPSLSTRLTRTDGIMEHITKIPNEAAHRGTIRPVKGPQTSTSPASPKGLHTGGTKRMETTTTALKTTTTALKTTSRATLTTSVYTPTLGTLTPLNASMQMASTIPTEMMITTPYVFPDVPETTSSLATSLGAETSTALPRTTPSVFNRESETTASLVSRSGAERSPVIQTLDVSSSEPDTTASWVIHPAETIPTVSKTTPNFFHSELDTVSSTATSHGADVSSAIPTNISPSELDALTPLVTISGTDTSTTFPTLTKSPHETETRTTWLTHPAETSSTIPRTIPNFSHHESDATPSIATSPGAETSSAIPIMTVSPGAEDLVTSQVTSSGTDRNMTIPTLTLSPGEPKTIASLVTHPEAQTSSAIPTSTISPAVSRLVTSMVTSLAAKTSTTNRALTNSPGEPATTVSLVTHPAQTSPTVPWTTSIFFHSKSDTTPSMTTSHGAESSSAVPTPTVSTEVPGVVTPLVTSSRAVISTTIPILTLSPGEPETTPSMATSHGEEASSAIPTPTVSPGVPGVVTSLVTSSRAVTSTTIPILTFSLGEPETTPSMATSHGTEAGSAVPTVLPEVPGMVTSLVASSRAVTSTTLPTLTLSPGEPETTPSMATSHGAEASSTVPTVSPEVPGVVTSLVTSSSGVNSTSIPTLILSPGELETTPSMATSHGAEASSAVPTPTVSPGVSGVVTPLVTSSRAVTSTTIPILTLSSSEPETTPSMATSHGVEASSAVLTVSPEVPGMVTSLVTSSRAVTSTTIPTLTISSDEPETTTSLVTHSEAKMISAIPTLAVSPTVQGLVTSLVTSSGSETSAFSNLTVASSQPETIDSWVAHPGTEASSVVPTLTVSTGEPFTNISLVTHPAESSSTLPRTTSRFSHSELDTMPSTVTSPEAESSSAISTTISPGIPGVLTSLVTSSGRDISATFPTVPESPHESEATASWVTHPAVTSTTVPRTTPNYSHSEPDTTPSIATSPGAEATSDFPTITVSPDVPDMVTSQVTSSGTDTSITIPTLTLSSGEPETTTSFITYSETHTSSAIPTLPVSPGASKMLTSLVISSGTDSTTTFPTLTETPYEPETTAIQLIHPAETNTMVPRTTPKFSHSKSDTTLPVAITSPGPEASSAVSTTTISPDMSDLVTSLVPSSGTDTSTTFPTLSETPYEPETTATWLTHPAETSTTVSGTIPNFSHRGSDTAPSMVTSPGVDTRSGVPTTTIPPSIPGVVTSQVTSSATDTSTAIPTLTPSPGEPETTASSATHPGTQTGFTVPIRTVPSSEPDTMASWVTHPPQTSTPVSRTTSSFSHSSPDATPVMATSPRTEASSAVLTTISPGAPEMVTSQITSSGAATSTTVPTLTHSPGMPETTALLSTHPRTETSKTFPASTVFPQVSETTASLTIRPGAETSTALPTQTTSSLFTLLVTGTSRVDLSPTASPGVSAKTAPLSTHPGTETSTMIPTSTLSLGLLETTGLLATSSSAETSTSTLTLTVSPAVSGLSSASITTDKPQTVTSWNTETSPSVTSVGPPEFSRTVTGTTMTLIPSEMPTPPKTSHGEGVSPTTILRTTMVEATNLATTGSSPTVAKTTTTFNTLAGSLFTPLTTPGMSTLASESVTSRTSYNHRSWISTTSSYNRRYWTPATSTPVTSTFSPGISTSSIPSSTAATVPFMVPFTLNFTITNLQYEEDMRHPGSRKFNATERELQGLLKPLFRNSSLEYLYSGCRLASLRPEKDSSATAVDAICTHRPDPEDLGLDRERLYWELSNLTNGIQELGPYTLDRNSLYVNGFTHRSSMPTTSTPGTSTVDVGTSGTPSSSPSPTTAGPLLMPFTLNFTITNLQYEEDMRRTGSRKFNTMESVLQGLLKPLFKNTSVGPLYSGCRLTLLRPEKDGAATGVDAICTHRLDPKSPGLNREQLYWELSKLTNDIEELGPYTLDRNSLYVNGFTHQSSVSTTSTPGTSTVDLRTSGTPSSLSSPTIMAAGPLLVPFTLNFTITNLQYGEDMGHPGSRKFNTTERVLQGLLGPIFKNTSVGPLYSGCRLTSLRSEKDGAATGVDAICIHHLDPKSPGLNRERLYWELSQLTNGIKELGPYTLDRNSLYVNGFTHRTSVPTSSTPGTSTVDLGTSGTPFSLPSPATAGPLLVLFTLNFTITNLKYEEDMHRPGSRKFNTTERVLQTLLGPMFKNTSVGLLYSGCRLTLLRSEKDGAATGVDAICTHRLDPKSPGVDREQLYWELSQLTNGIKELGPYTLDRNSLYVNGFTHWIPVPTSSTPGTSTVDLGSGTPSSLPSPTTAGPLLVPFTLNFTITNLKYEEDMHCPGSRKFNTTERVLQSLLGPMFKNTSVGPLYSGCRLTLLRSEKDGAATGVDAICTHRLDPKSPGVDREQLYWELSQLTNGIKELGPYTLDRNSLYVNGFTHQTSAPNTSTPGTSTVDLGTSGTPSSLPSPTSAGPLLVPFTLNFTITNLQYEEDMHHPGSRKFNTTERVLQGLLGPMFKNTSVGLLYSGCRLTLLRPEKNGAATGMDAICSHRLDPKSPGLNREQLYWELSQLTHGIKELGPYTLDRNSLYVNGFTHRSSVAPTSTPGTSTVDLGTSGTPSSLPSPTTAVPLLVPFTLNFTITNLQYGEDMRHPGSRKFNTTERVLQGLLGPLFKNSSVGPLYSGCRLISLRSEKDGAATGVDAICTHHLNPQSPGLDREQLYWQLSQMTNGIKELGPYTLDRNSLYVNGFTHRSSGLTTSTPWTSTVDLGTSGTPSPVPSPTTTGPLLVPFTLNFTITNLQYEENMGHPGSRKFNITESVLQGLLKPLFKSTSVGPLYSGCRLTLLRPEKDGVATRVDAICTHRPDPKIPGLDRQQLYWELSQLTHSITELGPYTLDRDSLYVNGFTQRSSVPTTSTPGTFTVQPETSETPSSLPGPTATGPVLLPFTLNFTITNLQYEEDMRRPGSRKFNTTERVLQGLLMPLFKNTSVSSLYSGCRLTLLRPEKDGAATRVDAVCTHRPDPKSPGLDRERLYWKLSQLTHGITELGPYTLDRHSLYVNGFTHQSSMTTTRTPDTSTMHLATSRTPASLSGPMTASPLLVLFTINFTITNLRYEENMHHPGSRKFNTTERVLQGLLRPVFKNTSVGPLYSGCRLTLLRPKKDGAATKVDAICTYRPDPKSPGLDREQLYWELSQLTHSITELGPYTLDRDSLYVNGFTQRSSVPTTSIPGTPTVDLGTSGTPVSKPGPSAASPLLVLFTLNFTITNLRYEENMQHPGSRKFNTTERVLQGLLRSLFKSTSVGPLYSGCRLTLLRPEKDGTATGVDAICTHHPDPKSPRLDREQLYWELSQLTHNITELGPYALDNDSLFVNGFTHRSSVSTTSTPGTPTVYLGASKTPASIFGPSAASHLLILFTLNFTITNLRYEENMWPGSRKFNTTERVLQGLLRPLFKNTSVGPLYSGCRLTLLRPEKDGEATGVDAICTHRPDPTGPGLDREQLYLELSQLTHSITELGPYTLDRDSLYVNGFTHRSSVPTTSTGVVSEEPFTLNFTINNLRYMADMGQPGSLKFNITDNVMQHLLSPLFQRSSLGARYTGCRVIALRSVKNGAETRVDLLCTYLQPLSGPGLPIKQVFHELSQQTHGITRLGPYSLDKDSLYLNGYNEPGPDEPPTTPKPATTFLPPLSEATTAMGYHLKTLTLNFTISNLQYSPDMGKGSATFNSTEGVLQHLLRPLFQKSSMGPFYLGCQLISLRPEKDGAATGVDTTCTYHPDPVGPGLDIQQLYWELSQLTHGVTQLGFYVLDRDSLFINGYAPQNLSIRGEYQINFHIVNWNLSNPDPTSSEYITLLRDIQDKVTTLYKGSQLHDTFRFCLVTNLTMDSVLVTVKALFSSNLDPSLVEQVFLDKTLNASFHWLGSTYQLVDIHVTEMESSVYQPTSSSSTQHFYLNFTITNLPYSQDKAQPGTTNYQRNKRNIEDALNQLFRNSSIKSYFSDCQVSTFRSVPNRHHTGVDSLCNFSPLARRVDRVAIYEEFLRMTRNGTQLQNFTLDRSSVLVDGYSPNRNEPLTGNSDLPFWAVILIGLAGLLGVITCLICGVLVTTRRRKKEGEYNVQQQCPGYYQSHLDLEDLQ

SEQ ID NO: 886 - protein, 314 aa, Homo sapiens
MAPPQVLAFGLLLAAATATFAAAQEECVCENYKLAVNCFVNNNRQCQCTSVGAQNTVICSKLAAKCLVMKAEMNGSKLGRRAKPEGALQNNDGLYDPDCDESGLFKAKQCNGTSMCWCVNTAGVRRTDKDTEITCSERVRTYWIIIELKHKAREKPYDSKSLRTALQKEITTRYQLDPKFITSILYENNVITIDLVQNSSQKTQNDVDIADVAYYFEKDVKGESLFHSKKMDLTVNGEQLDLDPGQTLIYYVDEKAPEFSMQGLKAGVIAVIVVVVIAVVAGIVVLVISRKKRMAKYEKAEIKEMGEMHRELNA

SEQ ID NO: 887 - protein, 630 aa, Homo sapiens
MALPTARPLLGSCGTPALGSLLFLLFSLGWVQPSRTLAGETGQEAAPLDGVLANPPNISSLSPRQLLGFPCAEVSGLSTERVRELAVALAQKNVKLSTEQLRCLAHRLSEPPEDLDALPLDLLLFLNPDAFSGPQACTRFFSRITKANVDLLPRGAPERQRLLPAALACWGVRGSLLSEADVRALGGLACDLPGRFVAESAEVLLPRLVSCPGPLDQDQQEAARAALQGGGPPYGPPSTWSVSTMDALRGLLPVLGQPIIRSIPQGIVAAWRQRSSRDPSWRQPERTILRPRFRREVEKTACPSGKKAREIDESLIFYKKWELEACVDAALLATQMDRVNAIPFTYEQLDVLKHKLDELYPQGYPESVIQHLGYLFLKMSPEDIRKWNVTSLETLKALLEVNKGHEMSPQAPRRPLPQVATLIDRFVKGRGQLDKDTLDTLTAFYPGYLCSLSPEELSSVPPSSIWAVRPQDLDTCDPRQLDVLYPKARLAFQNMNGSEYFVKIQSFLGGAPTEDLKALSQQNVSMDLATFMKLRTDAVLPLTVAEVQKLLGPHVEGLKAEERHRPVRDWILRQRQDDLDTLGLGLQGGIPNGYLVLDLSMQEALSGTPCLLGPGPVLTVLALLLASTLA

SEQ ID NO: 888 - protein, 622 aa, Homo sapiens
MALPTARPLLGSCGTPALGSLLFLLFSLGWVQPSRTLAGETGQEAAPLDGVLANPPNISSLSPRQLLGFPCAEVSGLSTERVRELAVALAQKNVKLSTEQLRCLAHRLSEPPEDLDALPLDLLLFLNPDAFSGPQACTRFFSRITKANVDLLPRGAPERQRLLPAALACWGVRGSLLSEADVRALGGLACDLPGRFVAESAEVLLPRLVSCPGPLDQDQQEAARAALQGGGPPYGPPSTWSVSTMDALRGLLPVLGQPIIRSIPQGIVAAWRQRSSRDPSWRQPERTILRPRFRREVEKTACPSGKKAREIDESLIFYKKWELEACVDAALLATQMDRVNAIPFTYEQLDVLKHKLDELYPQGYPESVIQHLGYLFLKMSPEDIRKWNVTSLETLKALLEVNKGHEMSPQVATLIDRFVKGRGQLDKDTLDTLTAFYPGYLCSLSPEELSSVPPSSIWAVRPQDLDTCDPRQLDVLYPKARLAFQNMNGSEYFVKIQSFLGGAPTEDLKALSQQNVSMDLATFMKLRTDAVLPLTVAEVQKLLGPHVEGLKAEERHRPVRDWILRQRQDDLDTLGLGLQGGIPNGYLVLDLSMQEALSGTPCLLGPGPVLTVLALLLASTLA

SEQ ID NO: 889 - protein, 656 aa, Homo sapiens [sequence omitted]

SEQ ID NO: 890 - protein, 621 aa, Homo sapiens
MALPTARPLLGSCGTPALGSLLFLLFSLGWVQPSRTLAGETGQAAPLDGVLANPPNISSLSPRQLLGFPCAEVSGLSTERVRELAVALAQKNVKLSTEQLRCLAHRLSEPPEDLDALPLDLLLFLNPDAFSGPQACTRFFSRITKANVDLLPRGAPERQRLLPAALACWGVRGSLLSEADVRALGGLACDLPGRFVAESAEVLLPRLVSCPGPLDQDQQEAARAALQGGGPPYGPPSTWSVSTMDALRGLLPVLGQPIIRSIPQGIVAAWRQRSSRDPSWRQPERTILRPRFRREVEKTACPSGKKAREIDESLIFYKKWELEACVDAALLATQMDRVNAIPFTYEQLDVLKHKLDELYPQGYPESVIQHLGYLFLKMSPEDIRKWNVTSLETLKALLEVNKGHEMSPQVATLIDRFVKGRGQLDKDTLDTLTAFYPGYLCSLSPEELSSVPPSSIWAVRPQDLDTCDPRQLDVLYPKARLAFQNMNGSEYFVKIQSFLGGAPTEDLKALSQQNVSMDLATFMKLRTDAVLPLTVAEVQKLLGPHVEGLKAEERHRPVRDWILRQRQDDLDTLGLGLQGGIPNGYLVLDLSMQEALSGTPCLLGPGPVLTVLALLLASTLA

SEQ ID NO: 891 - protein, 308 aa, Homo sapiens
MRALVLLLSLFLLGGQAQHVSDWTYSEGALDEAHWPQHYPACGGQRQSPINLQRTKVRYNPSLKGLNMTGYETQAGEFPMVNNGHTVQISLPSTMRMTVADGTVYIAQQMHFHWGGASSEISGSEHTVDGIRHVIEIHIVHYNSKYKSYDIAQDAPDGLAVLAAFVEVKNYPENTYYSNFISHLANIKYPGQRTTLTGLDVQDMLPRNLQHYYTYHGSLTTPPCTENVHWFVLADFVKLSRTQVWKLENSLLDHRNKTIHNDYRRTQPLNHRVVESNFPNQEYTLGSEFQFYLHKIEEILDYLRRALN

SEQ ID NO: 892 - protein, 313 aa, Homo sapiens
MRALVLLLSLFLLGGQAQHVSDWTYSEGALDEAHWPQHYPACGGQRQSPINLQRTKVRYNPSLKGLNMTGYETQAGEFPMVNNGHTVQISLPSTMRMTVADGTVYIAQQMHFHWGGASSEISGSEHTVDGIRHVIEIHIVHYNSKYKSYDIAQDAPDGLAVLAAFVEVKNYPENTYYSNFISHLANIKYPGQRTTLTGLDVQDMLPRNLQHYYTYHGSLTTPPCTENVHWFVLADFVKLSRTQVWKLENSLLDHRNKTIHNDYRRTQPLNHRVVESNFPNQGKGHGGHRGRSQNPRVQPTSTRHPLALGSLEA

SEQ ID NO: 893 - protein, 248 aa, Homo sapiens
MRALVLLLSLFLLGGQAQHVSDWTYSVQISLPSTMRMTVADGTVYIAQQMHFHWGGASSEISGSEHTVDGIRHVIEIHIVHYNSKYKSYDIAQDAPDGLAVLAAFVEVKNYPENTYYSNFISHLANIKYPGQRTTLTGLDVQDMLPRNLQHYYTYHGSLTTPPCTENVHWFVLADFVKLSRTQVWKLENSLLDHRNKTIHNDYRRTQPLNHRVVESNFPNQEYTLGSEFQFYLHKIEEILDYLRRALN

SEQ ID NO: 894 - protein, 680 aa, Homo sapiens
MAPWPELGDAQPNPDKYLEGAAGQQPTAPDKSKETNKTDNTEAPVTKIELLPSYSTATLIDEPTEVDDPWNLPTLQDSGIKWSERDTKGKILCFFQGIGRLILLLGFLYFFVCSLDILSSAFQLVGGKMAGQFFSNSSIMSNPLLGLVIGVLVTVLVQSSSTSTSIVVSMVSSSLLTVRAAIPIIMGANIGTSITNTIVALMQVGDRSEFRRAFAGATVHDFFNWLSVLVLLPVEVATHYLEIITQLIVESFHFKNGEDAPDLLKVITKPFTKLIVQLDKKVISQIAMNDEKAKNKSLVKIWCKTFTNKTQINVTVPSTANCTSPSLCWTDGIQNWTMKNVTYKENIAKCQHIFVNFHLPDLAVGTILLILSLLVLCGCLIMIVKILGSVLKGQVATVIKKTINTDFPFPFAWLTGYLAILVGAGMTFIVQSSSVFTSALTPLIGIGVITIERAYPLTLGSNIGTTTTAILAALASPGNALRSSLQIALCHFFFNISGILLWYPIPFTRLPIRMAKGLGNISAKYRWFAVFYLIIFFFLIPLTVFGLSLAGWRVLVGVGVPVVFIIILVLCLRLLQSRCPRVLPKKLQNWNFLPLWMRSLKPWDAVVSKFTGCFQMRCCCCCRVCCRACCLLCDCPKCCRAQEGQDVPVKAPETFDNITISREAQGEVPASDSKTECTAL

SEQ ID NO: 895 - protein, 679 aa, Homo sapiens
MAPWPELGDAQPNPDKYLEGAAGQQPTAPDKSKETNKNNTEAPVTKIELLPSYSTATLIDEPTEVDDPWNLPTLQDSGIKWSERDTKGKILCFFQGIGRLILLLGFLYFFVCSLDILSSAFQLVGGKMAGQFFSNSSIMSNPLLGLVIGVLVTVLVQSSSTSTSIVVSMVSSSLLTVRAAIPIIMGANIGTSITNTIVALMQVGDRSEFRRAFAGATVHDFFNWLSVLVLLPVEVATHYLEIITQLIVESFHFKNGEDAPDLLKVITKPFTKLIVQLDKKVISQIAMNDEKAKNKSLVKIWCKTFTNKTQINVTVPSTANCTSPSLCWTDGIQNWTMKNVTYKENIAKCQHIFVNFHLPDLAVGTILLILSLLVLCGCLIMIVKILGSVLKGQVATVIKKTINTDFPFPFAWLTGYLAILVGAGMTFIVQSSSVFTSALTPLIGIGVITIERAYPLTLGSNIGTTTTAILAALASPGNALRSSLQIALCHFFFNISGILLWYPIPFTRLPIRMAKGLGNISAKYRWFAVFYLIIFFFLIPLTVFGLSLAGWRVLVGVGVPVVFIIILVLCLRLLQSRCPRVLPKKLQNWNPWDAVVSKFTGCFQMRCCCCCRVCCRACCLLCDCPKCCRCSKCCEDLEEAQEGQDVPVKAPETFDNITISREAQGEVPASDSKTECTAL

SEQ ID NO: 896 - protein, 323 aa, Homo sapiens
MARGPGLAPPPLRLPLLLLVLAAVTGHTAAQDNCTCPTNKMTVCSPDGPGGRCQCRALGSGMAVDCSTLTSKCLLLKARMSAPKNARTLVRPSEHALVDNDGLYDPDCDPEGRFKARQCNQTSVCWCVNSVGVRRTDKGDLSLRCDELVRTHHILIDLRHRPTAGAFNHSDLDAELRRLFRERYRLHPKFVAAVHYEQPTIQIELRQNTSQKAAGDVDIGDAAYYFERDIKGESLFQGRGGLDLRVRGEPLQVERTLIYYLDEIPPKFSMKRLTAGLIAVIVVVVVALVAGMAVLVITNRRKSGKYKKVEIKELGELRKEPSL

SEQ ID NO: 897 - protein, 702 aa, Homo sapiens
MESPSAPPHRWCIPWQRLLLTASLLTFWNPPTTAKLTIESTPFNVAEGKEVLLLVHNLPQHLFGYSWYKGERVDGNRQIIGYVIGTQQATPGPAYSGREIIYPNASLLIQNIIQNDTGFYTLHVIKSDLVNEEATGQFRVYPELPKPSISSNNSKPVEDKDAVAFTCEPETQDATYLWWVNNQSLPVSPRLQLSNGNRTLTLFNVTRNDTASYKCETQNPVSARRSDSVILNVLYGPDAPTISPLNTSYRSGENLNLSCHAASNPPAQYSWFVNGTFQQSTQELFIPNITVNNSGSYTCQAHNSDTGLNRTTVTTITVYAEPPKPFITSNNSNPVEDEDAVALTCEPEIQNTTYLWWVNNQSLPVSPRLQLSNDNRTLTLLSVTRNDVGPYECGIQNKLSVDHSDPVILNVLYGPDDPTISPSYTYYRPGVNLSLSCHAASNPPAQYSWLIDGNIQQHTQELFISNITEKNSGLYTCQANNSASGHSRTTVKTITVSAELPKPSISSNNSKPVEDKDAVAFTCEPEAQNTTYLWWVNGQSLPVSPRLQLSNGNRTLTLFNVTRNDARAYVCGIQNSVSANRSDPVTLDVLYGPDTPIISPPDSSYLSGANLNLSCHSASNPSPQYSWRINGIPQQHTQVLFIAKITPNNNGTYACFVSNLATGRNNSIVKSITVSASGTSPGLSAGATVGIMIGVLVGVALI

SEQ ID NO: 898 - protein, 701 aa, Homo sapiens [sequence omitted]

SEQ ID NO: 899 - protein, 260 aa, Homo sapiens
MAVTACQGLGFVVSLIGIAGIIAATCMDQWSTQDLYNNPVTAVFNYQGLWRSCVRESSGFTECRGYFTLLGLPAMLQAVRALMIVGIVLGAIGLLVSIFALKCIRIGSMEDSAKANMTLTSGIMFIVSGLCAIAGVSVFANMLVTNFWMSTANMYTGMGGMVQTVQTRYTFGAALFVGWVAGGLTLIGGVMMCIACRGLAPEETNYKAVSYHASGHSVAYKPGGFKASTGFGSNTKNKKIYDGGARTEDEVQSYPSKHDY

SEQ ID NO: 900 - protein, 942 aa, Homo sapiens
MRPSGTAGAALLALLAALCPASRALEEKKNYVVTDHGSCVRACGADSYEMEEDGVRKCKKCEGPCRKVCNGIGIGEFKDSLSINATNIKHFKNCTSISGDLHILPVAFRGDSFTHTPPLDPQELDILKTVKEITGFLLIQAWPENRTDLHAFENLEIIRGRTKQHGQFSLAVVSLNITSLGLRSLKEISDGDVIISGNKNLCYANTINWKKLFGTSGQKTKIISNRGENSCKATGQVCHALCSPEGCWGPEPRDCVSCRNVSRGRECVDKCNLLEGEPREFVENSECIQCHPECLPQAMNITCTGRGPDNCIQCAHYIDGPHCVKTCPAGVMGENNTLVWKYADAGHVCHLCHPNCTYGCTGPGLEGCPTNGPKIPSIATGMVGALLLLLVVALGIGLFMRRRHIVRKRTLRRLLQERELVEPLTPSGEAPNQALLRILKETEFKKIKVLGSGAFGTVYKGLWIPEGEKVKIPVAIKELREATSPKANKEILDEAYVMASVDNPHVCRLLGICLTSTVQLITQLMPFGCLLDYVREHKDNIGSQYLLNWCVQIAKGMNYLEDRRLVHRDLAARNVLVKTPQHVKITDFGLAKLLGAEEKEYHAEGGKVPIKWMALESILHRIYTHQSDVWSYGVTVWELMTFGSKPYDGIPASEISSILEKGERLPQPPICTIDVYMIMVKCWMIDADSRPKFRELIIEFSKMARDPQRYLVIQGDERMHLPSPTDSNFYRALMDEEDMDDVVDADEYLIPQQGFFSSPSTSRTPLLSSLSATSNNSTVACIDRNGLQSCPIKEDSFLQRYSSDPTGALTEDSIDDTFLPVPEYINQSVPKRPAGSVQNPVYHNQPLNPAPSRDPHYQDPHSTAVGNPEYLNTVQPTCVNSTFDSPAHWAQKGSHQISLDNPDYQQDFFPKEAKPNGIFKGSTAENAEYLRVAPQSSEFIGA

SEQ ID NO: 901 - protein, 760 aa, Homo sapiens
MKTWVKIVFGVATSAVLALLVMCIVLRPSRVHNSEENTMRALTLKDILNGTFSYKTFFPNWISGQEYLHQSADNNIVLYNIETGQSYTILSNRTMKSVNASNYGLSPDRQFVYLESDYSKLWRYSYTATYYIYDLSNGEFVRGNELPRPIQYLCWSPVGSKLAYVYQNNIYLKQRPGDPPFQITFNGRENKIFNGIPDWVYEEEMLATKYALWWSPNGKFLAYAEFNDTDIPVIAYSYYGDEQYPRTINIPYPKAGAKNPVVRIFIIDTTYPAYVGPQEVPVPAMIASSDYYFSWLTWVTDERVCLQWLKRVQNVSVLSICDFREDWQTWDCPKTQEHIEESRTGWAGGFFVSTPVFSYDAISYYKIFSDKDGYKHIHYIKDTVENAIQITSGKWEAINIFRVTQDSLFYSSNEFEEYPGRRNIYRISIGSYPPSKKCVTCHLRKERCQYYTASFSDYAKYYALVCYGPGIPISTLHDGRTDQEIKILEENKELENALKNIQLPKEEIKKLEVDEITLWYKMILPPQFDRSKKYPLLIQVYGGPCSQSVRSVFAVNWISYLASKEGMVIALVDGRGTAFQGDKLLYAVYRKLGVYEVEDQITAVRKFIEMGFIDEKRIAIWGWSYGGYVSSLALASGTGLFKCGIAVAPVSSWEYYASVYTERFMGLPTKDDNLEHYKNSTVMARAEYFRNVDYLLIHGTADDNVHFQNSAQIAKALVNAQVDFQAMWYSDQNHGLSGLSTNHLYTHMTHFLKQCFSLSD

SEQ ID NO: 902 - protein, 239 aa, Homo sapiens
MILPPQFDRSKKYPLLIQVYGGPCSQSVRSVFAVNWISYLASKEGMVIALVDGRGTAFQGDKLLYAVYRKLGVYEVEDQITAVRKFIEMGFIDEKRIAIWGWSYGGYVSSLALASGTGLFKCGIAVAPVSSWEYYASVYTERFMGLPTKDDNLEHYKNSTVMARAEYFRNVDYLLIHGTADDNVHFQNSAQIAKALVNAQVDFQAMWYSDQNHGLSGLSTNHLYTHMTHFLKQCFSLSD

SEQ ID NO: 903 - protein, 976 aa, Homo sapiens
MELQAARACFALLWGCALAAAAAAQGKEVVLLDFAAAGGELGWLTHPYGKGWDLMQNIMNDMPIYMYSVCNVMSGDQDNWLRTNWVYRGEAERIFIELKFTVRDCNSFPGGASSCKETFNLYYAESDLDYGTNFQKRLFTKIDTIAPDEITVSSDFEARHVKLNVEERSVGPLTRKGFYLAFQDIGACVALLSVRVYYKKCPELLQGLAHFPETIAGSDAPSLATVAGTCVDHAVVPPGGEEPRMHCAVDGEWLVPIGQCLCQAGYEKVEDACQACSPGFFKFEASESPCLECPEHTLPSPEGATSCECEEGFFRAPQDPASMPCTRPPSAPHYLTAVGMGAKVELRWTPPQDSGGREDIVYSVTCEQCWPESGECGPCEASVRYSEPPHGLTRTSVTVSDLEPHMNYTFTVEARNGVSGLVTSRSFRTASVSINQTEPPKVRLEGRSTTSLSVSWSIPPPQQSRVWKYEVTYRKKGDSNSYNVRRTEGFSVTLDDLAPDTTYLVQVQALTQEGQGAGSKVHEFQTLSPEGSGNLAVIGGVAVGVVLLLVLAGVGFFIHRRRKNQRARQSPEDVYFSKSEQLKPLKTYVDPHTYEDPNQAVLKFTTEIHPSCVTRQKVIGAGEFGEVYKGMLKTSSGKKEVPVAIKTLKAGYTEKQRVDFLGEAGIMGQFSHHNIIRLEGVISKYKPMMIITEYMENGALDKFLREKDGEFSVLQLVGMLRGIAAGMKYLANMNYVHRDLAARNILVNSNLVCKVSDFGLSRVLEDDPEATYTTSGGKIPIRWTAPEAISYRKFTSASDVWSFGIVMWEVMTYGERPYWELSNHEVMKAINDGFRLPTPMDCPSAIYQLMMQCWQQERARRPKFADIVSILDKLIRAPDSLKTLADFDPRVSIRLPSTSGSEGVPFRTVSEWLESIKMQQYTEHFMAAGYTAIEKVVQMTNDDIKRIGVRLPGHQKRIAYSLLGLKDQVNTVGIPI

SEQ ID NO: 904 - protein, 497 aa, Homo sapiens
MELQAARACFALLWGCALAAAAAAQGKEVVLLDFAAAGGELGWLTHPYGKGWDLMQNIMNDMPIYMYSVCNVMSGDQDNWLRTNWVYRGEAERIFIELKFTVRDCNSFPGGASSCKETFNLYYAESDLDYGTNFQKRLFTKIDTIAPDEITVSSDFEARHVKLNVEERSVGPLTRKGFYLAFQDIGACVALLSVRVYYKKCPELLQGLAHFPETIAGSDAPSLATVAGTCVDHAVVPPGGEEPRMHCAVDGEWLVPIGQCLCQAGYEKVEDACQACSPGFFKFEASESPCLECPEHTLPSPEGATSCECEEGFFRAPQDPASMPCTRPPSAPHYLTAVGMGAKVELRWTPPQDSGGREDIVYSVTCEQCWPESGECGPCEASVRYSEPPHGLTRTSVTVSDLEPHMNYTFTVEARNGVSGLVTSRSFRTASVSINQTEPPKVRLEGRSTTSLSVSWSIPPPQQSRVWKYEVTYRKKVTPRGAGLALAGPTAGDRLVT

SEQ ID NO: 905 - protein, 1400 aa, Homo sapiens
MELLPPLPQSFLLLLLLPAKPAAGEDWQCPRTPYAASRDFDVKYVVPSFSAGGLVQAMVTYEGDRNESAVFVAIRNRLHVLGPDLKSVQSLATGPAGDPGCQTCAACGPGPHGPPGDTDTKVLVLDPALPALVSCGSSLQGRCFLHDLEPQGTAVHLAAPACLFSAHHNRPDDCPDCVASPLGTRVTVVEQGQASYFYVASSLDAAVAASFSPRSVSIRRLKADASGFAPGFVALSVLPKHLVSYSIEYVHSFHTGAFVYFLTVQPASVTDDPSALHTRLARLSATEPELGDYRELVLDCRFAPKRRRRGAPEGGQPYPVLRVAHSAPVGAQLATELSIAEGQEVLFGVFVTGKDGGPGVGPNSVVCAFPIDLLDTLIDEGVERCCESPVHPGLRRGLDFFQSPSFCPNPPGLEALSPNTSCRHFPLLVSSSFSRVDLFNGLLGPVQVTALYVTRLDNVTVAHMGTMDGRILQVELVRSLNYLLYVSNFSLGDSGQPVQRDVSRLGDHLLFASGDQVFQVPIQGPGCRHFLTCGRCLRAWHFMGCGWCGNMCGQQKECPGSWQQDHCPPKLTEFHPHSGPLRGSTRLTLCGSNFYLHPSGLVPEGTHQVTVGQSPCRPLPKDSSKLRPVPRKDFVEEFECELEPLGTQAVGPTNVSLTVTNMPPGKHFRVDGTSVLRGFSFMEPVLIAVQPLFGPRAGGTCLTLEGQSLSVGTSRAVLVNGTECLLARVSEGQLLCATPPGATVASVPLSLQVGGAQVPGSWTFQYREDPVVLSISPNCGYINSHITICGQHLTSAWHLVLSFHDGLRAVESRCERQLPEQQLCRLPEYVVRDPQGWVAGNLSARGDGAAGFTLPGFRFLPPPHPPSANLVPLKPEEHAIKFEYIGLGAVADCVGINVTVGGESCQHEFRGDMVVCPLPPSLQLGQDGAPLQVCVDGECHILGRVVRPGPDGVPQSTLLGILLPLLLLVAALATALVFSYWWRRKQLVLPPNLNDLASLDQTAGATPLPILYSGSDYRSGLALPAIDGLDSTTCVHGASFSDSEDESCVPLLRKESIQLRDLDSALLAEVKDVLIPHERVVTHSDRVIGKGHFGVVYHGEYIDQAQNRIQCAIKSLSRITEMQQVEAFLREGLLMRGLNHPNVLALIGIMLPPEGLPHVLLPYMCHGDLLQFIRSPQRNPTVKDLISFGLQVARSMEYLAEQKFVHRDLAARNCMLDESFTVKVADFGLARDILDREYYSVQQHRHARLPVKWMALESLQTYRFTTKSDVWSFGVLLWELLTRGAPPYRHIDPFDLTHFLAQGRRLPQPEYCPDSLYQVMQQCWEADPAVRPTFRVLVGEVEQIVSALLGDHYVQLPATYMNLGPSTSHEMNVRPEQPQFSPMPGNVRRPRPLSEPPRPT

SEQ ID NO: 906 - protein, 1351 aa, Homo sapiens
MELLPPLPQSFLLLLLLPAKPAAGEDWQCPRTPYAASRDFDVKYVVPSFSAGGLVQAMVTYEGDRNESAVFVAIRNRLHVLGPDLKSVQSLATGPAGDPGCQTCAACGPGPHGPPGDTDTKVLVLDPALPALVSCGSSLQGRCFLHDLEPQGTAVHLAAPACLFSAHHNRPDDCPDCVASPLGTRVTVVEQGQASYFYVASSLDAAVAASFSPRSVSIRRLKADASGFAPGFVALSVLPKHLVSYSIEYVHSFHTGAFVYFLTVQPASVTDDPSALHTRLARLSATEPELGDYRELVLDCRFAPKRRRRGAPEGGQPYPVLRVAHSAPVGAQLATELSIAEGQEVLFGVFVTGKDGGPGVGPNSVVCAFPIDLLDTLIDEGVERCCESPVHPGLRRGLDFFQSPSFCPNPPGLEALSPNTSCRHFPLLVSSSFSRVDLFNGLLGPVQVTALYVTRLDNVTVAHMGTMDGRILQVELVRSLNYLLYVSNFSLGDSGQPVQRDVSRLGDHLLFASGDQVFQVPIQGPGCRHFLTCGRCLRAWHFMGCGWCGNMCGQQKECPGSWQQDHCPPKLTEFHPHSGPLRGSTRLTLCGSNFYLHPSGLVPEGTHQVTVGQSPCRPLPKDSSKLRPVPRKDFVEEFECELEPLGTQAVGPTNVSLTVTNMPPGKHFRVDGTSVLRGFSFMEPVLIAVQPLFGPRAGGTCLTLEGQSLSVGTSRAVLVNGTECLLARVSEGQLLCATPPGATVASVPLSLQVGGAQVPGSWTFQYREDPVVLSISPNCGYINSHITICGQHLTSAWHLVLSFHDGLRAVESRCERQLPEQQLCRLPEYVVRDPQGWVAGNLSARGDGAAGFTLPGFRFLPPPHPPSANLVPLKPEEHAIKFEVCVDGECHILGRVVRPGPDGVPQSTLLGILLPLLLLVAALATALVFSYWWRRKQLVLPPNLNDLASLDQTAGATPLPILYSGSDYRSGLALPAIDGLDSTTCVHGASFSDSEDESCVPLLRKESIQLRDLDSALLAEVKDVLIPHERVVTHSDRVIGKGHFGVVYHGEYIDQAQNRIQCAIKSLSRITEMQQVEAFLREGLLMRGLNHPNVLALIGIMLPPEGLPHVLLPYMCHGDLLQFIRSPQRNPTVKDLISFGLQVARSMEYLAEQKFVHRDLAARNCMLDESFTVKVADFGLARDILDREYYSVQQHRHARLPVKWMALESLQTYRFTTKSDVWSFGVLLWELLTRGAPPYRHIDPFDLTHFLAQGRRLPQPEYCPDSLYQVMQQCWEADPAVRPTFRVLVGEVEQIVSALLGDHYVQLPATYMNLGPSTSHEMNVRPEQPQFSPMPGNVRRPRPLSEPPRPT

SEQ ID NO: 907 - protein, 495 aa, Homo sapiens
MELLPPLPQSFLLLLLLPAKPAAGEDWQCPRTPYAASRDFDVKYVVPSFSAGGLVQAMVTYEGDRNESAVFVAIRNRLHVLGPDLKSVQSLATGPAGDPGCQTCAACGPGPHGPPGDTDTKVLVLDPALPALVSCGSSLQGRCFLHDLEPQGTAVHLAAPACLFSAHHNRPDDCPDCVASPLGTRVTVVEQGQASYFYVASSLDAAVAASFSPRSVSIRRLKADASGFAPGFVALSVLPKHLVSYSIEYVHSFHTGAFVYFLTVQPASVTDDPSALHTRLARLSATEPELGDYRELVLDCRFAPKRRRRGAPEGGQPYPVLRVAHSAPVGAQLATELSIAEGQEVLFGVFVTGKDGGPGVGPNSVVCAFPIDLLDTLIDEGVERCCESPVHPGLRRGLDFFQSPSFCPNPPGLEALSPNTSCRHFPLLVSSSFSRVDLFNGLLGPVQVTALYVTRLDNVTVAHMGTMDGRILQVGPHPHSPLALGPCLHPHFAHI

SEQ ID NO: 908 - protein, 541 aa, Homo sapiens
MELLPPLPQSFLLLLLLPAKPAAGEDWQCPRTPYAASRDFDVKYVVPSFSAGGLVQAMVTYEGDRNESAVFVAIRNRLHVLGPDLKSVQSLATGPAGDPGCQTCAACGPGPHGPPGDTDTKVLVLDPALPALVSCGSSLQGRCFLHDLEPQGTAVHLAAPACLFSAHHNRPDDCPDCVASPLGTRVTVVEQGQASYFYVASSLDAAVAASFSPRSVSIRRLKADASGFAPGFVALSVLPKHLVSYSIEYVHSFHTGAFVYFLTVQPASVTDDPSALHTRLARLSATEPELGDYRELVLDCRFAPKRRRRGAPEGGQPYPVLRVAHSAPVGAQLATELSIAEGQEVLFGVFVTGKDGGPGVGPNSVVCAFPIDLLDTLIDEGVERCCESPVHPGLRRGLDFFQSPSFCPNPVFQVPIQGPGCRHFLTCGRCLRAWHFMGCGWCGNMCGQQKECPGSWQQDHCPPKLTEFHPHSGPLRGSTRLTLCGSNFYLHPSGLVPEGTHQVTVGQSPCRPLPKDSSKLRYNLVPPLPFPEGGNQAAPSP

SEQ ID NO: 909 - protein, 907 aa, Homo sapiens
MELLPPLPQSFLLLLLLPAKPAAGEDWQCPRTPYAASRDFDVKYVVPSFSAGGLVQAMVTYEGDRNESAVFVAIRNRLHVLGPDLKSVQSLATGPAGDPGCQTCAACGPGPHGPPGDTDTKVLVLDPALPALVSCGSSLQGRCFLHDLEPQGTAVHLAAPACLFSAHHNRPDDCPDCVASPLGTRVTVVEQGQASYFYVASSLDAAVAASFSPRSVSIRRLKADASGFAPGFVALSVLPKHLVSYSIEYVHSFHTGAFVYFLTVQPASVTDDPSALHTRLARLSATEPELGDYRELVLDCRFAPKRRRRGAPEGGQPYPVLRVAHSAPVGAQLATELSIAEGQEVLFGVFVTGKDGGPGVGPNSVVCAFPIDLLDTLIDEGVERCCESPVHPGLRRGLDFFQSPSFCPNPPGLEALSPNTSCRHFPLLVSSSFSRVDLFNGLLGPVQVTALYVTRLDNVTVAHMGTMDGRILQVELVRSLNYLLYVSNFSLGDSGQPVQRDVSRLGDHLLFASGDQVFQVPIQGPGCRHFLTCGRCLRAWHFMGCGWCGNMCGQQKECPGSWQQDHCPPKLTEFHPHSGPLRGSTRLTLCGSNFYLHPSGLVPEGTHQVTVGQSPCRPLPKDSSKLRPVPRKDFVEEFECELEPLGTQAVGPTNVSLTVTNMPPGKHFRVDGTSVLRGFSFMEPVLIAVQPLFGPRAGGTCLTLEGQSLSVGTSRAVLVNGTECLLARVSEGQLLCATPPGATVASVPLSLQVGGAQVPGSWTFQYREDPVVLSISPNCGYINSHITICGQHLTSAWHLVLSFHDGLRAVESRCERQLPEQQLCRLPEYVVRDPQGWVAGNLSARGDGAAGFTLPGFRFLPPPHPPSANLVPLKPEEHAIKFEVSVRDRGRDSWGSESRGQPTGWSS

SEQ ID NO: 910 - protein, 647 aa, Homo sapiens
MELLPPLPQSFLLLLLLPAKPAAGEDWQCPRTPYAASRDFDVKYVVPSFSAGGLVQAMVTYEGDRNESAVFVAIRNRLHVLGPDLKSVQSLATGPAGDPGCQTCAACGPGPHGPPGDTDTKVLVLDPALPALVSCGSSLQGRCFLHDLEPQGTAVHLAAPACLFSAHHNRPDDCPDCVASPLGTRVTVVEQGQASYFYVASSLDAAVAASFSPRSVSIRRLKADASGFAPGFVALSVLPKHLVSYSIEYVHSFHTGAFVYFLTVQPASVTDDPSALHTRLARLSATEPELGDYRELVLDCRFAPKRRRRGAPEGGQPYPVLRVAHSAPVGAQLATELSIAEGQEVLFGVFVTGKDGGPGVGPNSVVCAFPIDLLDTLIDEGVERCCESPVHPGLRRGLDFFQSPSFCPNPPGLEALSPNTSCRHFPLLVSSSFSRVDLFNGLLGPVQVTALYVTRLDNVTVAHMGTMDGRILQVELVRSLNYLLYVSNFSLGDSGQPVQRDVSRLGDHLLFASGDQVFQVPIQGPGCRHFLTCGRCLRAWHFMGCGWCGNMCGQQKECPGSWQQDHCPPKLTEFHPHSGPLRGSTRLTLCGSNFYLHPSGLVPEGTHQVTVGQSPCRPLPKDSSKLRYNLVPPLPFPEGGNQAAPSP

SEQ ID NO: 911 - protein, 131 aa, Homo sapiens
MKIFLPVLLAALLGVERASSLMCFSCLNQKSNLYCLKPTICSDQDNYCVTVSASAGIGNLVTFGHSLSKTCSPACPIPEGVNVGVASMGISCCQSFLCNFSAADGGLRASVTLLGAGLLLSLLPALLRFGP

SEQ ID NO: 912 - protein, 271 aa, Homo sapiens
MFRDFGEPGPSSGNGGGYGGPAQPPAAAQAAQQKFHLVPSINTMSGSQELQWMVQPHFLGPSSYPRPLTYPQYSPPQPRPGVIRALGPPPGVRRRPCEQISPEEEERRRVRRERNKLAAAKCRNRRKELTDFLQAETDKLEDEKSGLQREIEELQKQKERLELVLEAHRPICKIPEGAKEGDTGSTSGTSSPPAPCRPVPCISLSPGPVLEPEALHTPTLMTTPSLTPFTPSLVFTYPSTPEPCASAHRKSSSSSGDPSSDPLGSPTLLAL

SEQ ID NO: 913 - protein, 169 aa, Homo sapiens
MFRDFGEPGPSSGNGGGYGGPAQPPAAAQAAQQETDKLEDEKSGLQREIEELQKQKERLELVLEAHRPICKIPEGAKEGDTGSTSGTSSPPAPCRPVPCISLSPGPVLEPEALHTPTLMTTPSLTPFTPSLVFTYPSTPEPCASAHRKSSSSSGDPSSDPLGSPTLLAL

SEQ ID NO: 914 - protein, 750 aa, Homo sapiens
MWNLLHETDSAVATARRPRWLCAGALVLAGGFFLLGFLFGWFIKSSNEATNITPKHNMKAFLDELKAENIKKFLYNFTQIPHLAGTEQNFQLAKQIQSQWKEFGLDSVELAHYDVLLSYPNKTHPNYISIINEDGNEIFNTSLFEPPPPGYENVSDIVPPFSAFSPQGMPEGDLVYVNYARTEDFFKLERDMKINCSGKIVIARYGKVFRGNKVKNAQLAGAKGVILYSDPADYFAPGVKSYPDGWNLPGGGVQRGNILNLNGAGDPLTPGYPANEYAYRRGIAEAVGLPSIPVHPIGYYDAQKLLEKMGGSAPPDSSWRGSLKVPYNVGPGFTGNFSTQKVKMHIHSTNEVTRIYNVIGTLRGAVEPDRYVILGGHRDSWVFGGIDPQSGAAVVHEIVRSFGTLKKEGWRPRRTILFASWDAEEFGLLGSTEWAEENSRLLQERGVAYINADSSIEGNYTLRVDCTPLMYSLVHNLTKELKSPDEGFEGKSLYESWTKKSPSPEFSGMPRISKLGSGNDFEVFFQRLGIASGRARYTKNWETNKFSGYPLYHSVYETYELVEKFYDPMFKYHLTVAQVRGGMVFELANSIVLPFDCRDYAVVLRKYADKIYSISMKHPQEMKTYSVSFDSLFSAVKNFTEIASKFSERLQDFDKSNPIVLRMMNDQLMFLERAFIDPLGLPDRPFYRHVIYAPSSHNKYAGESFPGIYDALFDIESKVDPSKAWGEVKRQIYVAAFTVQAAAETLSEVA

SEQ ID NO: 915 - protein, 110 aa, Homo sapiens
ELANSIVLPFDCRDYAVVLRKYADKIYSISMKHPQEMKTYSVSFDSLFSAVKNFTEIASKFSERLQDFDKSMSSMLQAATTSMQGSHSQEFMMLCLILKAKWTLPRPGEK

SEQ ID NO: 916 - protein, 84 aa, Homo sapiens
PFSAFSPQGMPEGDLVYVNYARTEDFFKLERDMKINCSGKIVIARYGKVFRGNKNMLIGVELQRLLVFQVFLFIQLDTMMHRSS

SEQ ID NO: 917 - protein, 693 aa, Homo sapiens
MKAFLDELKAENIKKFLYNFTQIPHLAGTEQNFQLAKQIQSQWKEFGLDSVELAHYDVLLSYPNKTHPNYISIINEDGNEIFNTSLFEPPPPGYENVSDIVPPFSAFSPQGMPEGDLVYVNYARTEDFFKLERDMKINCSGKIVIARYGKVFRGNKVKNAQLAGAKGVILYSDPADYFAPGVKSYPDGWNLPGGGVQRGNILNLNGAGDPLTPGYPANEYAYRRGIAEAVGLPSIPVHPIGYYDAQKLLEKMGGSAPPDSSWRGSLKVPYNVGPGFTGNFSTQKVKMHIHSTNEVTRIYNVIGTLRGAVEPDRYVILGGHRDSWVFGGIDPQSGAAVVHEIVRSFGTLKKEGWRPRRTILFASWDAEEFGLLGSTEWAEENSRLLQERGVAYINADSSIEGNYTLRVDCTPLMYSLVHNLTKELKSPDEGFEGKSLYESWTKKSPSPEFSGMPRISKLGSGNDFEVFFQRLGIASGRARYTKNWETNKFSGYPLYHSVYETYELVEKFYDPMFKYHLTVAQVRGGMVFELANSIVLPFDCRDYAVVLRKYADKIYSISMKHPQEMKTYSVSFDSLFSAVKNFTEIASKFSERLQDFDKSNPIVLRMMNDQLMFLERAFIDPLGLPDRPFYRHVIYAPSSHNKYAGESFPGIYDALFDIESKVDPSKAWGEVKRQIYVAAFTVQAAAETLSEVA

SEQ ID NO: 918 - protein, 735 aa, Homo sapiens
MTAGSSYPLFLAAYACTGCLAERLGWFIKSSNEATNITPKHNMKAFLDELKAENIKKFLYNFTQIPHLAGTEQNFQLAKQIQSQWKEFGLDSVELAHYDVLLSYPNKTHPNYISIINEDGNEIFNTSLFEPPPPGYENVSDIVPPFSAFSPQGMPEGDLVYVNYARTEDFFKLERDMKINCSGKIVIARYGKVFRGNKVKNAQLAGAKGVILYSDPADYFAPGVKSYPDGWNLPGGGVQRGNILNLNGAGDPLTPGYPANEYAYRRGIAEAVGLPSIPVHPIGYYDAQKLLEKMGGSAPPDSSWRGSLKVPYNVGPGFTGNFSTQKVKMHIHSTNEVTRIYNVIGTLRGAVEPDRYVILGGHRDSWVFGGIDPQSGAAVVHEIVRSFGTLKKEGWRPRRTILFASWDAEEFGLLGSTEWAEENSRLLQERGVAYINADSSIEGNYTLRVDCTPLMYSLVHNLTKELKSPDEGFEGKSLYESWTKKSPSPEFSGMPRISKLGSGNDFEVFFQRLGIASGRARYTKNWETNKFSGYPLYHSVYETYELVEKFYDPMFKYHLTVAQVRGGMVFELANSIVLPFDCRDYAVVLRKYADKIYSISMKHPQEMKTYSVSFDSLFSAVKNFTEIASKFSERLQDFDKSNPIVLRMMNDQLMFLERAFIDPLGLPDRPFYRHVIYAPSSHNKYAGESFPGIYDALFDIESKVDPSKAWGEVKRQIYVAAFTVQAAAETLSEVA

SEQ ID NO: 919 - protein, 719 aa, Homo sapiens
MWNLLHETDSAVATARRPRWLCAGALVLAGGFFLLGFLFGWFIKSSNEATNITPKHNMKAFLDELKAENIKKFLYNFTQIPHLAGTEQNFQLAKQIQSQWKEFGLDSVELAHYDVLLSYPNKTHPNYISIINEDGNEIFNTSLFEPPPPGYENVSDIVPPFSAFSPQGMPEGDLVYVNYARTEDFFKLERDMKINCSGKIVIARYGKVFRGNKVKNAQLAGAKGVILYSDPADYFAPGVKSYPDGWNLPGGGVQRGNILNLNGAGDPLTPGYPANEYAYRRGIAEAVGLPSIPVHPIGYYDAQKLLEKMGGSAPPDSSWRGSLKVPYNVGPGFTGNFSTQKVKMHIHSTNEVTRIYNVIGTLRGAVEPDRYVILGGHRDSWVFGGIDPQSGAAVVHEIVRSFGTLKKEGWRPRRTILFASWDAEEFGLLGSTEWAEENSRLLQERGVAYINADSSIEGNYTLRVDCTPLMYSLVHNLTKELKSPDEGFEGKSLYESWTKKSPSPEFSGMPRISKLGSGNDFEVFFQRLGIASGRARYTKNWETNKFSGYPLYHSVYETYELVEKFYDPMFKYHLTVAQVRGGMVFELANSIVLPFDCRDYAVVLRKYADKIYSISMKHPQEMKTYSVSFDSLFSAVKNFTEIASKFSERLQDFDKSKHVIYAPSSHNKYAGESFPGIYDALFDIESKVDPSKAWGEVKRQIYVAAFTVQAAAETLSEVA

SEQ ID NO: 920 - protein, 704 aa, Homo sapiens
MTAGSSYPLFLAAYACTGCLAERLGWFIKSSNEATNITPKHNMKAFLDELKAENIKKFLYNFTQIPHLAGTEQNFQLAKQIQSQWKEFGLDSVELAHYDVLLSYPNKTHPNYISIINEDGNEIFNTSLFEPPPPGYENVSDIVPPFSAFSPQGMPEGDLVYVNYARTEDFFKLERDMKINCSGKIVIARYGKVFRGNKVKNAQLAGAKGVILYSDPADYFAPGVKSYPDGWNLPGGGVQRGNILNLNGAGDPLTPGYPANEYAYRRGIAEAVGLPSIPVHPIGYYDAQKLLEKMGGSAPPDSSWRGSLKVPYNVGPGFTGNFSTQKVKMHIHSTNEVTRIYNVIGTLRGAVEPDRYVILGGHRDSWVFGGIDPQSGAAVVHEIVRSFGTLKKEGWRPRRTILFASWDAEEFGLLGSTEWAEENSRLLQERGVAYINADSSIEGNYTLRVDCTPLMYSLVHNLTKELKSPDEGFEGKSLYESWTKKSPSPEFSGMPRISKLGSGNDFEVFFQRLGIASGRARYTKNWETNKFSGYPLYHSVYETYELVEKFYDPMFKYHLTVAQVRGGMVFELANSIVLPFDCRDYAVVLRKYADKIYSISMKHPQEMKTYSVSFDSLFSAVKNFTEIASKFSERLQDFDKSKHVIYAPSSHNKYAGESFPGIYDALFDIESKVDPSKAWGEVKRQIYVAAFTVQAAAETLSEVA

SEQ ID NO: 921 - protein, 442 aa, Homo sapiens
MGGSAPPDSSWRGSLKVPYNVGPGFTGNFSTQKVKMHIHSTNEVTRIYNVIGTLRGAVEPDRYVILGGHRDSWVFGGIDPQSGAAVVHEIVRSFGTLKKEGWRPRRTILFASWDAEEFGLLGSTEWAEENSRLLQERGVAYINADSSIEGNYTLRVDCTPLMYSLVHNLTKELKSPDEGFEGKSLYESWTKKSPSPEFSGMPRISKLGSGNDFEVFFQRLGIASGRARYTKNWETNKFSGYPLYHSVYETYELVEKFYDPMFKYHLTVAQVRGGMVFELANSIVLPFDCRDYAVVLRKYADKIYSISMKHPQEMKTYSVSFDSLFSAVKNFTEIASKFSERLQDFDKSNPIVLRMMNDQLMFLERAFIDPLGLPDRPFYRHVIYAPSSHNKYAGESFPGIYDALFDIESKVDPSKAWGEVKRQIYVAAFTVQAAAETLSEVA

SEQ ID NO: 922 - protein, 618 aa, Homo sapiens
MVSPRMSGLLSQTVILALIFLPQTRPAGVFELQIHSFGPGPGPGAPRSPCSARLPCRLFFRVCLKPGLSEEAAESPCALGAALSARGPVYTEQPGAPAPDLPLPDGLLQVPFRDAWPGTFSFIIETWREELGDQIGGPAWSLLARVAGRRRLAAGGPWARDIQRAGAWELRFSYRARCEPPAVGTACTRLCRPRSAPSRCGPGLRPCAPLEDECEAPLVCRAGCSPEHGFCEQPGECRCLEGWTGPLCTVPVSTSSCLSPRGPSSATTGCLVPGPGPCDGNPCANGGSCSETPRSFECTCPRGFYGLRCEVSGVTCADGPCFNGGLCVGGADPDSAYICHCPPGFQGSNCEKRVDRCSLQPCRNGGLCLDLGHALRCRCRAGFAGPRCEHDLDDCAGRACANGGTCVEGGGAHRCSCALGFGGRDCRERADPCAARPCAHGGRCYAHFSGLVCACAPGYMGARCEFPVHPDGASALPAAPPGLRPGDPQRYLLPPALGLLVAAGVAGAALLLVHVRRRGHSQDAGSRLLAGTPEPSVHALPDALNNLRTQEGSGDGPSSSVDWNRPEDVDPQGIYVISAPSIYAREVATPLFPPLHTGRAGQRQHLLFPYPSSILSVK

SEQ ID NO: 923 - protein, 587 aa, Homo sapiens
MVSPRMSGLLSQTVILALIFLPQTRPAGVFELQIHSFGPGPGPGAPRSPCSARLPCRLFFRVCLKPGLSEEAAESPCALGAALSARGPVYTEQPGAPAPDLPLPDGLLQVPFRDAWPGTFSFIIETWREELGDQIGGPAWSLLARVAGRRRLAAGGPWARDIQRAGAWELRFSYRARCEPPAVGTACTRLCRPRSAPSRCGPGLRPCAPLEDECEAPLVCRAGCSPEHGFCEQPGECRCLEGWTGPLCTVPVSTSSCLSPRGPSSATTGCLVPGPGPCDGNPCANGGSCSETPRSFECTCPRGFYGLRCEVSGVTCADGPCFNGGLCVGGADPDSAYICHCPPGFQGSNCEKRVDRCSLQPCRNGGLCLDLGHALRCRCRAGFAGPRCEHDLDDCAGRACANGGTCVEGGGAHRCSCALGFGGRDCRERADPCAARPCAHGGRCYAHFSGLVCACAPGYMGARCEFPVHPDGASALPAAPPGLRPGDPQRYLLPPALGLLVAAGVAGAALLLVHVRRRGHSQDAGSRLLAGTPEPSVHALPDALNNLRTQEGSGDGPSSSVDWNRPEDVDPQGIYVISAPSIYAREA

SEQ ID NO: 924 - protein, 1070 aa, Homo sapiens
MGAARGSPARPRRLPLLSVLLLPLLGGTQTAIVFIKQPSSQDALQGRRALLRCEVEAPGPVHVYWLLDGAPVQDTERRFAQGSSLSFAAVDRLQDSGTFQCVARDDVTGEEARSANASFNIKWIEAGPVVLKHPASEAEIQPQTQVTLRCHIDGHPRPTYQWFRDGTPLSDGQSNHTVSSKERNLTLRPAGPEHSGLYSCCAHSAFGQACSSQNFTLSIADESFARVVLAPQDVVVARYEEAMFHCQFSAQPPPSLQWLFEDETPITNRSRPPHLRRATVFANGSLLLTQVRPRNAGIYRCIGQGQRGPPIILEATLHLAEIEDMPLFEPRVFTAGSEERVTCLPPKGLPEPSVWWEHAGVRLPTHGRVYQKGHELVLANIAESDAGVYTCHAANLAGQRRQDVNITVATVPSWLKKPQDSQLEEGKPGYLDCLTQATPKPTVVWYRNQMLISEDSRFEVFKNGTLRINSVEVYDGTWYRCMSSTPAGSIEAQARVQVLEKLKFTPPPQPQQCMEFDKEATVPCSATGREKPTIKWERADGSSLPEWVTDNAGTLHFARVTRDDAGNYTCIASNGPQGQIRAHVQLTVAVFITFKVEPERTTVYQGHTALLQCEAQGDPKPLIQWKGKDRILDPTKLGPRMHIFQNGSLVIHDVAPEDSGRYTCIAGNSCNIKHTEAPLYVVDKPVPEESEGPGSPPPYKMIQTIGLSVGAAVAYIIAVLGLMFYCKKRCKAKRLQKQPEGEEPEMECLNGGPLQNGQPSAEIQEEVALTSLGSGPAATNKRHSTSDKMHFPRSSLQPITTLGKSEFGEVFLAKAQGLEEGVAETLVLVKSLQSKDEQQQLDFRRELEMFGKLNHANVVRLLGLCREAEPHYMVLEYVDLGDLKQFLRISKSKDEKLKSQPLSTKQKVALCTQVALGMEHLSNNRFVHKDLAARNCLVSAQRQVKVSALGLSKDVYNSEYYHFRQAWVPLRWMSPEAILEGDFSTKSDVWAFGVLMWEVFTHGEMPHGGQADDEVLADLQAGKARLPQPEGCPSKLYRLMQRCWALSPKDRPSFSEIASALGDSTVDSKP

SEQ ID NO: 925 - protein, 1030 aa, Homo sapiens
MGAARGSPARPRRLPLLSVLLLPLLGGTQTAIVFIKQPSSQDALQGRRALLRCEVEAPGPVHVYWLLDGAPVQDTERRFAQGSSLSFAAVDRLQDSGTFQCVARDDVTGEEARSANASFNIKWIEAGPVVLKHPASEAEIQPQTQVTLRCHIDGHPRPTYQWFRDGTPLSDGQSNHTVSSKERNLTLRPAGPEHSGLYSCCAHSAFGQACSSQNFTLSIADESFARVVLAPQDVVVARYEEAMFHCQFSAQPPPSLQWLFEDETPITNRSRPPHLRRATVFANGSLLLTQVRPRNAGIYRCIGQGQRGPPIILEATLHLAEIEDMPLFEPRVFTAGSEERVTCLPPKGLPEPSVWWEHAGVRLPTHGRVYQKGHELVLANIAESDAGVYTCHAANLAGQRRQDVNITVATVPSWLKKPQDSQLEEGKPGYLDCLTQATPKPTVVWYRNQMLISEDSRFEVFKNGTLRINSVEVYDGTWYRCMSSTPAGSIEAQARVQVLDGSSLPEWVTDNAGTLHFARVTRDDAGNYTCIASNGPQGQIRAHVQLTVAVFITFKVEPERTTVYQGHTALLQCEAQGDPKPLIQWKGKDRILDPTKLGPRMHIFQNGSLVIHDVAPEDSGRYTCIAGNSCNIKHTEAPLYVVDKPVPEESEGPGSPPPYKMIQTIGLSVGAAVAYIIAVLGLMFYCKKRCKAKRLQKQPEGEEPEMECLNGGPLQNGQPSAEIQEEVALTSLGSGPAATNKRHSTSDKMHFPRSSLQPITTLGKSEFGEVFLAKAQGLEEGVAETLVLVKSLQSKDEQQQLDFRRELEMFGKLNHANVVRLLGLCREAEPHYMVLEYVDLGDLKQFLRISKSKDEKLKSQPLSTKQKVALCTQVALGMEHLSNNRFVHKDLAARNCLVSAQRQVKVSALGLSKDVYNSEYYHFRQAWVPLRWMSPEAILEGDFSTKSDVWAFGVLMWEVFTHGEMPHGGQADDEVLADLQAGKARLPQPEGCPSKLYRLMQRCWALSPKDRPSFSEIASALGDSTVDSKP

SEQ ID NO: 926 - protein, 940 aa, Homo sapiens
MGAARGSPARPRRLPLLSVLLLPLLGGTQTAIVFIKQPSSQDALQGRRALLRCEVEAPGPVHVYWLLDGAPVQDTERRFAQGSSLSFAAVDRLQDSGTFQCVARDDVTGEEARSANASFNIKWIEAGPVVLKHPASEAEIQPQTQVTLRCHIDGHPRPTYQWFRDGTPLSDGQSNHTVSSKERNLTLRPAGPEHSGLYSCCAHSAFGQACSSQNFTLSIADESFARVVLAPQDVVVARYEEAMFHCQFSAQPPPSLQWLFEDETPITNRSRPPHLRRATVFANGSLLLTQVRPRNAGIYRCIGQGQRGPPIILEATLHLAEIEDMPLFEPRVFTAGSEERVTCLPPKGLPEPSVWWEHAGVRLPTHGRVYQKGHELVLANIAESDAGVYTCHAANLAGQRRQDVNITVANGSSLPEWVTDNAGTLHFARVTRDDAGNYTCIASNGPQGQIRAHVQLTVAVFITFKVEPERTTVYQGHTALLQCEAQGDPKPLIQWKGKDRILDPTKLGPRMHIFQNGSLVIHDVAPEDSGRYTCIAGNSCNIKHTEAPLYVVDKPVPEESEGPGSPPPYKMIQTIGLSVGAAVAYIIAVLGLMFYCKKRCKAKRLQKQPEGEEPEMECLNGGPLQNGQPSAEIQEEVALTSLGSGPAATNKRHSTSDKMHFPRSSLQPITTLGKSEFGEVFLAKAQGLEEGVAETLVLVKSLQSKDEQQQLDFRRELEMFGKLNHANVVRLLGLCREAEPHYMVLEYVDLGDLKQFLRISKSKDEKLKSQPLSTKQKVALCTQVALGMEHLSNNRFVHKDLAARNCLVSAQRQVKVSALGLSKDVYNSEYYHFRQAWVPLRWMSPEAILEGDFSTKSDVWAFGVLMWEVFTHGEMPHGGQADDEVLADLQAGKARLPQPEGCPSKLYRLMQRCWALSPKDRPSFSEIASALGDSTVDSKP

SEQ ID NO: 927 - protein, 1014 aa, Homo sapiens
MGAARGSPARPRRLPLLSVLLLPLLGGTQTAIVFIKQPSSQDALQGRRALLRCEVEAPGPVHVYWLLDGAPVQDTERRFAQGSSLSFAAVDRLQDSGTFQCVARDDVTGEEARSANASFNIKWIEAGPVVLKHPASEAEIQPQTQVTLRCHIDGHPRPTYQWFRDGTPLSDGQSNHTVSSKERNLTLRPAGPEHSGLYSCCAHSAFGQACSSQNFTLSIADESFARVVLAPQDVVVARYEEAMFHCQFSAQPPPSLQWLFEDETPITNRSRPPHLRRATVFANGSLLLTQVRPRNAGIYRCIGQGQRGPPIILEATLHLAEIEDMPLFEPRVFTAGSEERVTCLPPKGLPEPSVWWEHAGVRLPTHGRVYQKGHELVLANIAESDAGVYTCHAANLAGQRRQDVNITVATVPSWLKKPQDSQLEEGKPGYLDCLTQATPKPTVVWYRNQMLISEDSRFEVFKNGTLRINSVEVYDGTWYRCMSSTPAGSIEAQARVQVLEKLKFTPPPQPQQCMEFDKEATVPCSATGREKPTIKWERADGSSLPEWVTDNAGTLHFARVTRDDAGNYTCIASNGPQGQIRAHVQLTVAVFITFKVEPERTTVYQGHTALLQCEAQGDPKPLIQWKDKPVPEESEGPGSPPPYKMIQTIGLSVGAAVAYIIAVLGLMFYCKKRCKAKRLQKQPEGEEPEMECLNGGPLQNGQPSAEIQEEVALTSLGSGPAATNKRHSTSDKMHFPRSSLQPITTLGKSEFGEVFLAKAQGLEEGVAETLVLVKSLQSKDEQQQLDFRRELEMFGKLNHANVVRLLGLCREAEPHYMVLEYVDLGDLKQFLRISKSKDEKLKSQPLSTKQKVALCTQVALGMEHLSNNRFVHKDLAARNCLVSAQRQVKVSALGLSKDVYNSEYYHFRQAWVPLRWMSPEAILEGDFSTKSDVWAFGVLMWEVFTHGEMPHGGQADDEVLADLQAGKARLPQPEGCPSKLYRLMQRCWALSPKDRPSFSEIASALGDSTVDSKP

SEQ ID NO: 928 - protein, 816 aa, Homo sapiens
MGAARGSPARPRRLPLLSVLLLPLLGGTQTAIVFIKQPSSQDALQGRRALLRCEVEAPGPVHVYWLLDGAPVQDTERRFAQGSSLSFAAVDRLQDSGTFQCVARDDVTGEEARSANASFNIKWIEAGPVVLKHPASEAEIQPQTQVTLRCHIDGHPRPTYQWFRDGTPLSDGQSNHTVSSKERNLTLRPAGPEHSGLYSCCAHSAFGQACSSQNFTLSIADESFARVVLAPQDVVVARYEEAMFHCQFSAQPPPSLQWLFEDETPITNRSRPPHLRRATVFANGSLLLTQVRPRNAGIYRCIGQGQRGPPIILEATLHLAEIEDMPLFEPRVFTAGSEERVTCLPPKGLPEPSVWWEHAGVRLPTHGRVYQKGHELVLANIAESDAGVYTCHAANLAGQRRQDVNITVATVPSWLKKPQDSQLEEGKPGYLDCLTQATPKPTVVWYRNQMLISEDSRFEVFKNGTLRINSVEVYDGTWYRCMSSTPAGSIEAQARVQVLEKLKFTPPPQPQQCMEFDKEATVPCSATGREKPTIKWERADGSSLPEWVTDNAGTLHFARVTRDDAGNYTCIASNGPQGQIRAHVQLTVAVFITFKVEPERTTVYQGHTALLQCEAQGDPKPLIQWKGKDRILDPTKLGPRMHIFQNGSLVIHDVAPEDSGRYTCIAGNSCNIKHTEAPLYVVDKPVPEESEGPGSPPPYKMIQTIGLSVGAAVAYIIAVLGLMFYCKKRCKAKRLQKQPEGEEPEMECLNGGPLQNGQPSAEIQEEVALTSLGSGPAATNKRHSTSDKMHFPRSSLQPITTLGRPQAVPEDFQEQG

SEQ ID NO: 929 - protein, 1078 aa, Homo sapiens
MGSFLSGEKRPSAPTVGSAMEKKEFPTPPGRVGPGTQTAIVFIKQPSSQDALQGRRALLRCEVEAPGPVHVYWLLDGAPVQDTERRFAQGSSLSFAAVDRLQDSGTFQCVARDDVTGEEARSANASFNIKWIEAGPVVLKHPASEAEIQPQTQVTLRCHIDGHPRPTYQWFRDGTPLSDGQSNHTVSSKERNLTLRPAGPEHSGLYSCCAHSAFGQACSSQNFTLSIADESFARVVLAPQDVVVARYEEAMFHCQFSAQPPPSLQWLFEDETPITNRSRPPHLRRATVFANGSLLLTQVRPRNAGIYRCIGQGQRGPPIILEATLHLAEIEDMPLFEPRVFTAGSEERVTCLPPKGLPEPSVWWEHAGVRLPTHGRVYQKGHELVLANIAESDAGVYTCHAANLAGQRRQDVNITVATVPSWLKKPQDSQLEEGKPGYLDCLTQATPKPTVVWYRNQMLISEDSRFEVFKNGTLRINSVEVYDGTWYRCMSSTPAGSIEAQARVQVLEKLKFTPPPQPQQCMEFDKEATVPCSATGREKPTIKWERADGSSLPEWVTDNAGTLHFARVTRDDAGNYTCIASNGPQGQIRAHVQLTVAVFITFKVEPERTTVYQGHTALLQCEAQGDPKPLIQWKGKDRILDPTKLGPRMHIFQNGSLVIHDVAPEDSGRYTCIAGNSCNIKHTEAPLYVVDKPVPEESEGPGSPPPYKMIQTIGLSVGAAVAYIIAVLGLMFYCKKRCKAKRLQKQPEGEEPEMECLNGGPLQNGQPSAEIQEEVALTSLGSGPAATNKRHSTSDKMHFPRSSLQPITTLGKSEFGEVFLAKAQGLEEGVAETLVLVKSLQSKDEQQQLDFRRELEMFGKLNHANVVRLLGLCREAEPHYMVLEYVDLGDLKQFLRISKSKDEKLKSQPLSTKQKVALCTQVALGMEHLSNNRFVHKDLAARNCLVSAQRQVKVSALGLSKDVYNSEYYHFRQAWVPLRWMSPEAILEGDFSTKSDVWAFGVLMWEVFTHGEMPHGGQADDEVLADLQAGKARLPQPEGCPSKLYRLMQRCWALSPKDRPSFSEIASALGDSTVDSKP

SEQ ID NO: 930 - protein, 755 aa, Homo sapiens
MARKLSVILILTFALSVTNPLHELKAAAFPQTTEKISPNWESGINVDLAISTRQYHLQQLFYRYGENNSLSVEGFRKLLQNIGIDKIKRIHIHHDHDHHSDHEHHSDHERHSDHEHHSEHEHHSDHDHHSHHNHAASGKNKRKALCPDHDSDSSGKDPRNSQGKGAHRPEHASGRRNVKDSVSASEVTSTVYNTVSEGTHFLETIETPRPGKLFPKDVSSSTPPSVTSKSRVSRLAGRKTNESVSEPRKGFMYSRNTNENPQECFNASKLLTSHGMGIQVPLNATEFNYLCPAIINQIDARSCLIHTSEKKAEIPPKTYSLQIAWVGGFIAISIISFLSLLGVILVPLMNRVFFKFLLSFLVALAVGTLSGDAFLHLLPHSHASHHHSHSHEEPAMEMKRGPLFSHLSSQNIEESAYFDSTWKGLTALGGLYFMFLVEHVLTLIKQFKDKKKKNQKKPENDDDVEIKKQLSKYESQLSTNEEKVDTDDRTEGYLRADSQEPSHFDSQQPAVLEEEEVMIAHAHPQEVYNEYVPRGCKNKCHSHFHDTLGQSDDLIHHHHDYHHILHHHHHQNHHPHSHSQRYSREELKDAGVATLAWMVIMGDGLHNFSDGLAIGAAFTEGLSSGLSTSVAVFCHELPHELGDFAVLLKAGMTVKQAVLYNALSAMLAYLGMATGIFIGHYAENVSMWIFALTAGLFMYVALVDMVPEMLHNDASDHGCSRWGYFFLQNAGMLLGFGIMLLISIFEHKIVFRINF

SEQ ID NO: 931 - protein, 433 aa, Homo sapiens
MGIQVPLNATEFNYLCPAIINQIDARSCLIHTSEKKAEIPPKTYSLQIAWVGGFIAISIISFLSLLGVILVPLMNRVFFKFLLSFLVALAVGTLSGDAFLHLLPHSHASHHHSHSHEEPAMEMKRGPLFSHLSSQNIEESAYFDSTWKGLTALGGLYFMFLVEHVLTLIKQFKDKKKKNQKKPENDDDVEIKKQLSKYESQLSTNEEKVDTDDRTEGYLRADSQEPSHFDSQQPAVLEEEEVMIAHAHPQEVYNEYVPRGCKNKCHSHFHDTLGQSDDLIHHHHDYHHILHHHHHQNHHPHSHSQRYSREELKDAGVATLAWMVIMGDGLHNFSDGLAIGAAFTEGLSSGLSTSVAVFCHELPHELGDFAVLLKAGMTVKQAVLYNALSAMLAYLGMATGIFIGHYAENVSMWIFALTAGLFMYVALVDMVSF

SEQ ID NO: 932 - protein, 937 aa, Homo sapiens
MHRPRRRGTRPPLLALLAALLLAARGAAAQETELSVSAELVPTSSWNISSELNKDSYLTLDEPMNNITTSLGQTAELHCKVSGNPPPTIRWFKNDAPVVQEPRRLSFRSTIYGSRLRIRNLDTTDTGYFQCVATNGKEVVSSTGVLFVKFGPPPTASPGYSDEYEEDGFCQPYRGIACARFIGNRTVYMESLHMQGEIENQITAAFTMIGTSSHLSDKCSQFAIPSLCHYAFPYCDETSSVPKPRDLCRDECEILENVLCQTEYIFARSNPMILMRLKLPNCEDLPQPESPEAANCIRIGIPMADPINKNHKCYNSTGVDYRGTVSVTKSGRQCQPWNSQYPHTHTFTALRFPELNGGHSYCRNPGNQKEAPWCFTLDENFKSDLCDIPACDSKDSKEKNKMEILYILVPSVAIPLAIALLFFFICVCRNNQKSSSAPVQRQPKHVRGQNVEMSMLNAYKPKSKAKELPLSAVRFMEELGECAFGKIYKGHLYLPGMDHAQLVAIKTLKDYNNPQQWTEFQQEASLMAELHHPNIVCLLGAVTQEQPVCMLFEYINQGDLHEFLIMRSPHSDVGCSSDEDGTVKSSLDHGDFLHIAIQIAAGMEYLSSHFFVHKDLAARNILIGEQLHVKISDLGLSREIYSADYYRVQSKSLLPIRWMPPEAIMYGKFSSDSDIWSFGVVLWEIFSFGLQPYYGFSNQEVIEMVRKRQLLPCSEDCPPRMYSLMTECWNEIPSRRPRFKDIHVRLRSWEGLSSHTSSTTPSGGNATTQTTSLSASPVSNLSNPRYPNYMFPSQGITPQGQIAGFIGPPIPQNQRFIPINGYPIPPGYAAFPAAHYQPTGPPRVIQHCPPPKSRSPSSASGSTSTGHVTSLPSSGSNQEANIPLLPHMSIPNHPGGMGITVFGNKSQKPYKIDSKQASLLGDANIHGHTESMISAEL

SEQ ID NO: 933 - protein, 388 aa, Homo sapiens
MLFEYINQGDLHEFLIMRSPHSDVGCSSDEDGTVKSSLDHGDFLHIAIQIAAGMEYLSSHFFVHKDLAARNILIGEQLHVKISDLGLSREIYSADYYRVQSKSLLPIRWMPPEAIMYGKFSSDSDIWSFGVVLWEIFSFGLQPYYGFSNQEVIEMVRKRQLLPCSEDCPPRMYSLMTECWNEIPSRRPRFKDIHVRLRSWEGLSSHTSSTTPSGGNATTQTTSLSASPVSNLSNPRYPNYMFPSQGITPQGQIAGFIGPPIPQNQRFIPINGYPIPPGYAAFPAAHYQPTGPPRVIQHCPPPKSRSPSSASGSTSTGHVTSLPSSGSNQEANIPLLPHMSIPNHPGGMGITVFGNKSQKPYKIDSKQASLLGDANIHGHTESMISAEL

SEQ ID NO: 934 - protein, 393 aa, Homo sapiens
MHRPRRRGTRPPLLALLAALLLAARGAAAQETELSVSAELVPTSSWNISSELNKDSYLTLDEPMNNITTSLGQTAELHCKVSGNPPPTIRWFKNDAPVVQEPRRLSFRSTIYGSRLRIRNLDTTDTGYFQCVATNGKEVVSSTGVLFVKFGPPPTASPGYSDEYEEDGFCQPYRGIACARFIGNRTVYMESLHMQGEIENQITAAFTMIGTSSHLSDKCSQFAIPSLCHYAFPYCDETSSVPKPRDLCRDECEILENVLCQTEYIFARSNPMILMRLKLPNCEDLPQPESPEAANCIRIGIPMADPINKNHKCYNSTGVDYRGTVSVTKSGRQCQPWNSQYPHTHTFTALRFPELNGGHSYCRNPGNQKEAPWCFTLDENFKSDLCDIPACGK

SEQ ID NO: 935 - protein, 314 aa, Homo sapiens
MPLEQRSQHCKPEEGLEARGEALGLVGAQAPATEEQEAASSSSTLVEVTLGEVPAAESPDPPQSPQGASSLPTTMNYPLWSQSYEDSSNQEEEGPSTFPDLESEFQAALSRKVAELVHFLLLKYRAREPVTKAEMLGSVVGNWQYFFPVIFSKASSSLQLVFGIELMEVDPIGHLYIFATCLGLSYDGLLGDNQIMPKAGLLIIVLAIIAREGDCAPEEKIWEELSVLEVFEGREDSILGDPKKLLTQHFVQENYLEYRQVPGSDPACYEFLWGPRALVETSYVKVLHHMVKISGGPHISYPPLHEWVLREGEE

SEQ ID NO: 936 - protein, 180 aa, Homo sapiens
MQAEGRGTGGSTGDADGPGGPGIPDGPGGNAGGPGEAGATGGRGPRGAGAARASGPGGGAPRGPHGGAASGLNGCCRCGARGPESRLLEFYLAMPFATPMEAELARRSLAQDAPPLPVPGVLLKEFTVSGNILTIRLTAADHRQLQLSISSCLQQLSLLMWITQCFLPVFLAQPPSGQRR

SEQ ID NO: 937 - protein, 581 aa, Homo sapiens
MPLKHYLLLLVGCQAWGAGLAYHGCPSECTCSRASQVECTGARIVAVPTPLPWNAMSLQILNTHITELNESPFLNISALIALRIEKNELSRITPGAFRNLGSLRYLSLANNKLQVLPIGLFQGLDSLESLLLSSNQLLQIQPAHFSQCSNLKELQLHGNHLEYIPDGAFDHLVGLTKLNLGKNSLTHISPRVFQHLGNLQVLRLYENRLTDIPMGTFDGLVNLQELALQQNQIGLLSPGLFHNNHNLQRLYLSNNHISQLPPSVFMQLPQLNRLTLFGNSLKELSPGIFGPMPNLRELWLYDNHISSLPDNVFSNLRQLQVLILSRNQISFISPGAFNGLTELRELSLHTNALQDLDGNVFRMLANLQNISLQNNRLRQLPGNIFANVNGLMAIQLQNNQLENLPLGIFDHLGKLCELRLYDNPWRCDSDILPLRNWLLLNQPRLGTDTVPVCFSPANVRGQSLIIINVNVAVPSVHVPEVPSYPETPWYPDTPSYPDTTSVSSTTELTSPVEDYTDLTTIQVTDDRSVWGMTQAQSGLAIAAIVIGIVALACSLAACVGCCCCKKRSQAVLMQMKAPNEC

SEQ ID NO: 938 - protein, 587 aa, Homo sapiens
MPLDKAMPLKHYLLLLVGCQAWGAGLAYHGCPSECTCSRASQVECTGARIVAVPTPLPWNAMSLQILNTHITELNESPFLNISALIALRIEKNELSRITPGAFRNLGSLRYLSLANNKLQVLPIGLFQGLDSLESLLLSSNQLLQIQPAHFSQCSNLKELQLHGNHLEYIPDGAFDHLVGLTKLNLGKNSLTHISPRVFQHLGNLQVLRLYENRLTDIPMGTFDGLVNLQELALQQNQIGLLSPGLFHNNHNLQRLYLSNNHISQLPPSVFMQLPQLNRLTLFGNSLKELSPGIFGPMPNLRELWLYDNHISSLPDNVFSNLRQLQVLILSRNQISFISPGAFNGLTELRELSLHTNALQDLDGNVFRMLANLQNISLQNNRLRQLPGNIFANVNGLMAIQLQNNQLENLPLGIFDHLGKLCELRLYDNPWRCDSDILPLRNWLLLNQPRLGTDTVPVCFSPANVRGQSLIIINVNVAVPSVHVPEVPSYPETPWYPDTPSYPDTTSVSSTTELTSPVEDYTDLTTIQVTDDRSVWGMTQAQSGLAIAAIVIGIVALACSLAACVGCCCCKKRSQAVLMQMKAPNEC

SEQ ID NO: 939 - protein, 580 aa, Homo sapiens
MAGTVRTACLVVAMLLSLDFPGQAQPPPPPPDATCHQVRSFFQRLQPGLKWVPETPVPGSDLQVCLPKGPTCCSRKMEEKYQLTARLNMEQLLQSASMELKFLIIQNAAVFQEAFEIVVRHAKNYTNAMFKNNYPSLTPQAFEFVGEFFTDVSLYILGSDINVDDMVNELFDSLFPVIYTQLMNPGLPDSALDINECLRGARRDLKVFGNFPKLIMTQVSKSLQVTRIFLQALNLGIEVINTTDHLKFSKDCGRMLTRMWYCSYCQGLMMVKPCGGYCNVVMQGCMAGVVEIDKYWREYILSLEELVNGMYRIYDMENVLLGLFSTIHDSIQYVQKNAGKLTTTIGKLCAHSQQRQYRSAYYPEDLFIDKKVLKVAHVEHEETLSSRRRELIQKLKSFISFYSALPGYICSHSPVAENDTLCWNGQELVERYSQKAARNGMKNQFNLHELKMKGPEPVVSQIIDKLKHINQLLRTMSMPKGRVLDKNLDEEGFESGDCGDDEDECIGGSGDGMIKVKNQLRFLAELAYDLDVDDAPGNSQQATPKDNEISTFHNLGNVHSPLKLLTSMAISVVCFFFLVH

SEQ ID NO: 940 - protein, 526 aa, Homo sapiens
MAGTVRTACLVVAMLLSLDFPGQAQPPPPPPDATCHQVRSFFQRLQPGLKWVPETPVPEAFEIVVRHAKNYTNAMFKNNYPSLTPQAFEFVGEFFTDVSLYILGSDINVDDMVNELFDSLFPVIYTQLMNPGLPDSALDINECLRGARRDLKVFGNFPKLIMTQVSKSLQVTRIFLQALNLGIEVINTTDHLKFSKDCGRMLTRMWYCSYCQGLMMVKPCGGYCNVVMQGCMAGVVEIDKYWREYILSLEELVNGMYRIYDMENVLLGLFSTIHDSIQYVQKNAGKLTTTIGKLCAHSQQRQYRSAYYPEDLFIDKKVLKVAHVEHEETLSSRRRELIQKLKSFISFYSALPGYICSHSPVAENDTLCWNGQELVERYSQKAARNGMKNQFNLHELKMKGPEPVVSQIIDKLKHINQLLRTMSMPKGRVLDKNLDEEGFESGDCGDDEDECIGGSGDGMIKVKNQLRFLAELAYDLDVDDAPGNSQQATPKDNEISTFHNLGNVHSPLKLLTSMAISVVCFFFLVH

SEQ ID NO: 941 - protein, 603 aa, Homo sapiens
MAGTVRTACLVVAMLLSLDFPGQAQPPPPPPDATCHQVRSFFQRLQPGLKWVPETPVPGSDLQVCLPKGPTCCSRKMEEKYQLTARLNMEQLLQSASMELKFLIIQNAAVFQEAFEIVVRHAKNYTNAMFKNNYPSLTPQAFEFVGEFFTDVSLYILGSDINVDDMVNELFDSLFPVIYTQLMNPGLPDSALDINECLRGARRDLKVFGNFPKLIMTQVSKSLQVTRIFLQALNLGIEVINTTDHLKFSKDCGRMLTRMWYCSYCQGLMMVKPCGGYCNVVMQGCMAGVVEIDKYWREYILSLEELVNGMYRIYDMENVLLGLFSTIHDSIQYVQKNAGKLTTTETEKKIWHFKYPIFFLCIGLDLQIGKLCAHSQQRQYRSAYYPEDLFIDKKVLKVAHVEHEETLSSRRRELIQKLKSFISFYSALPGYICSHSPVAENDTLCWNGQELVERYSQKAARNGMKNQFNLHELKMKGPEPVVSQIIDKLKHINQLLRTMSMPKGRVLDKNLDEEGFESGDCGDDEDECIGGSGDGMIKVKNQLRFLAELAYDLDVDDAPGNSQQATPKDNEISTFHNLGNVHSPLKLLTSMAISVVCFFFLVH

SEQ ID NO: 942 - protein, 220 aa, Homo sapiens
MASAGMQILGVVLTLLGWVNGLVSCALPMWKVTAFIGNSIVVAQVVWEGLWMSCVVQSTGQMQCKVYDSLLALPQDLQAARALCVIALLVALFGLLVYLAGAKCTTCVEEKDSKARLVLTSGIVFVISGVLTLIPVCWTAHAIIRDFYNPLVAEAQKRELGASLYLGWAASGLLLLGGGLLCCTCPSGGSQGPSHYMARYSTSAPAISRGPSEYPTKNYV

SEQ ID NO: 943 - protein, 305 aa, Homo sapiens
MTSRTPLLVTACLYYSYCNSRHLQQGVRKSKRPVFSHCQVPETQKTDTRHLSGARAGVCPCCHPDGLLATMRDLLQYIACFFAFFSAGFLIVATWTDCWMVNADDSLEVSTKCRGLWWECVTNAFDGIRTCDEYDSILAEHPLKLVVTRALMITADILAGFGFLTLLLGLDCVKFLPDEPYIKVRICFVAGATLLIAGTPGIIGSVWYAVDVYVERSTLVLHNIFLGIQYKFGWSCWLGMAGSLGCFLAGAVLTCCLYLFKDVGPERNYPYSLRKAYSAAGVSMAKSYSAPRTETAKMYAVDTRV

SEQ ID NO: 944 - protein, 260 aa, Homo sapiens
MAKDNSTVRCFQGLLIFGNVIIGCCGIALTAECIFFVSDQHSLYPLLEATDNDDIYGAAWIGIFVGICLFCLSVLGIVGIMKSSRKILLAYFILMFIVYAFEVASCITAATQQDFFTPNLFLKQMLERYQNNSPPNNDDQWKNNGVTKTWDRLMLQDNCCGVNGPSDWQKYTSAFRTENNDADYPWPRQCCVMNNLKEPLNLEACKLGVPGFYHNQGCYELISGPMNRHAWGVAWFGFAILCWTFWVLLGTMFYWSRIEY

SEQ ID NO: 945 - protein, 282 aa, Homo sapiens
MASLGQILFWSIISIIIILAGAIALIIGFGISGRHSITVTTVASAGNIGEDGILSCTFEPDIKLSDIVIQWLKEGVLGLVHEFKEGKDELSEQDEMFRGRTAVFADQVIVGNASLRLKNVQLTDAGTYKCYIITSKGKGNANLEYKTGAFSMPEVNVDYNASSETLRCEAPRWFPQPTVVWASQVDQGANFSEVSNTSFELNSENVTMKVVSVLYNVTINNTYSCMIENDIAKATGDIKVTESEIKRRSHLQLLNSKASLCVSSFFAISWALLPLSPYLMLK

SEQ ID NO: 946 - protein, 667 aa, Homo sapiens
MSSQPAGNQTSPGATEDYSYGSWYIDEPQGGEELQPEGEVPSCHTSIPPGLYHACLASLSILVLLLLAMLVRRRQLWPDCVRGRPGLPSPVDFLAGDRPRAVPAAVFMVLLSSLCLLLPDEDALPFLTLASAPSQDGKTEAPRGAWKILGLFYYAALYYPLAACATAGHTAAHLLGSTLSWAHLGVQVWQRAECPQVPKIYKYYSLLASLPLLLGLGFLSLWYPVQLVRSFSRRTGAGSKGLQSSYSEEYLRNLLCRKKLGSSYHTSKHGFLSWARVCLRHCIYTPQPGFHLPLKLVLSATLTGTAIYQVALLLLVGVVPTIQKVRAGVTTDVSYLLAGFGIVLSEDKQEVVELVKHHLWALEVCYISALVLSCLLTFLVLMRSLVTHRTNLRALHRGAALDLSPLHRSPHPSRQAIFCWMSFSAYQTAFICLGLLVQQIIFFLGTTALAFLVLMPVLHGRNLLLFRSLESSWPFWLTLALAVILQNMAAHWVFLETHDGHPQLTNRRVLYAATFLLFPLNVLVGAMVATWRVLLSALYNAIHLGQMDLSLLPPRAATLDPGYYTYRNFLKIEVSQSHPAMTAFCSLLLQAQSLLPRTMAAPQDSLRPGEEDEGMQLLQTKDSMAKGARPGASRGRARWGLAYTLLHNPTLQVFRKTALLGANGAQP

SEQ ID NO: 947 - protein, 159 aa, Homo sapiens
MSSQPAGNQTSPGATEDYSYGSWYIDEPQGGEELQPEGEVPSCHTSIPPGLYHACLASLSILVLLLLAMLVRRRQLWPDCVRGRPGLPSPVDFLAGDRPRAVPAAVFMVLLSSLCLLLPDEDALPFLTLASAPSQDGKTEAPRGNLPKITELRLVRAWI

SEQ ID NO: 948 - protein, 658 aa, Homo sapiens
MSSQPAGNQTSPGATEDYSYGSWYIDEPQGGEELQPEGEVPSCHTSIPPGLYHACLASLSILVLLLLAMLVRRRQLWPDCVRGRPGLPRPRAVPAAVFMVLLSSLCLLLPDEDALPFLTLASAPSQDGKTEAPRGAWKILGLFYYAALYYPLAACATAGHTAAHLLGSTLSWAHLGVQVWQRAECPQVPKIYKYYSLLASLPLLLGLGFLSLWYPVQLVRSFSRRTGAGSKGLQSSYSEEYLRNLLCRKKLGSSYHTSKHGFLSWARVCLRHCIYTPQPGFHLPLKLVLSATLTGTAIYQVALLLLVGVVPTIQKVRAGVTTDVSYLLAGFGIVLSEDKQEVVELVKHHLWALEVCYISALVLSCLLTFLVLMRSLVTHRTNLRALHRGAALDLSPLHRSPHPSRQAIFCWMSFSAYQTAFICLGLLVQQIIFFLGTTALAFLVLMPVLHGRNLLLFRSLESSWPFWLTLALAVILQNMAAHWVFLETHDGHPQLTNRRVLYAATFLLFPLNVLVGAMVATWRVLLSALYNAIHLGQMDLSLLPPRAATLDPGYYTYRNFLKIEVSQSHPAMTAFCSLLLQAQSLLPRTMAAPQDSLRPGEEDEGMQLLQTKDSMAKGARPGASRGRARWGLAYTLLHNPTLQVFRKTALLGANGAQP

SEQ ID NO: 949 - protein, 706 aa, Homo sapiens
MGGKGGGDTRGPVLFPCQLAQALSPRRAFPRELKEKGQRMSSQPAGNQTSPGATEDYSYGSWYIDEPQGGEELQPEGEVPSCHTSIPPGLYHACLASLSILVLLLLAMLVRRRQLWPDCVRGRPGLPSPVDFLAGDRPRAVPAAVFMVLLSSLCLLLPDEDALPFLTLASAPSQDGKTEAPRGAWKILGLFYYAALYYPLAACATAGHTAAHLLGSTLSWAHLGVQVWQRAECPQVPKIYKYYSLLASLPLLLGLGFLSLWYPVQLVRSFSRRTGAGSKGLQSSYSEEYLRNLLCRKKLGSSYHTSKHGFLSWARVCLRHCIYTPQPGFHLPLKLVLSATLTGTAIYQVALLLLVGVVPTIQKVRAGVTTDVSYLLAGFGIVLSEDKQEVVELVKHHLWALEVCYISALVLSCLLTFLVLMRSLVTHRTNLRALHRGAALDLSPLHRSPHPSRQAIFCWMSFSAYQTAFICLGLLVQQIIFFLGTTALAFLVLMPVLHGRNLLLFRSLESSWPFWLTLALAVILQNMAAHWVFLETHDGHPQLTNRRVLYAATFLLFPLNVLVGAMVATWRVLLSALYNAIHLGQMDLSLLPPRAATLDPGYYTYRNFLKIEVSQSHPAMTAFCSLLLQAQSLLPRTMAAPQDSLRPGEEDEGMQLLQTKDSMAKGARPGASRGRARWGLAYTLLHNPTLQVFRKTALLGANGAQP

SEQ ID NO: 950 - protein, 704 aa, Homo sapiens
MQIRLLRAELVVPLWQFIRQWPPGSDGWGQMEEKGQRMSSQPAGNQTSPGATEDYSYGSWYIDEPQGGEELQPEGEVPSCHTSIPPGLYHACLASLSILVLLLLAMLVRRRQLWPDCVRGRPGLPSPVDFLAGDRPRAVPAAVFMVLLSSLCLLLPDEDALPFLTLASAPSQDGKTEAPRGAWKILGLFYYAALYYPLAACATAGHTAAHLLGSTLSWAHLGVQVWQRAECPQVPKIYKYYSLLASLPLLLGLGFLSLWYPVQLVRSFSRRTGAGSKGLQSSYSEEYLRNLLCRKKLGSSYHTSKHGFLSWARVCLRHCIYTPQPGFHLPLKLVLSATLTGTAIYQVALLLLVGVVPTIQKVRAGVTTDVSYLLAGFGIVLSEDKQEVVELVKHHLWALEVCYISALVLSCLLTFLVLMRSLVTHRTNLRALHRGAALDLSPLHRSPHPSRQAIFCWMSFSAYQTAFICLGLLVQQIIFFLGTTALAFLVLMPVLHGRNLLLFRSLESSWPFWLTLALAVILQNMAAHWVFLETHDGHPQLTNRRVLYAATFLLFPLNVLVGAMVATWRVLLSALYNAIHLGQMDLSLLPPRAATLDPGYYTYRNFLKIEVSQSHPAMTAFCSLLLQAQSLLPRTMAAPQDSLRPGEEDEGMQLLQTKDSMAKGARPGASRGRARWGLAYTLLHNPTLQVFRKTALLGANGAQP

SEQ ID NO: 951 - protein, 682 aa, Homo sapiens
MDSQGDWAAQEKGQRMSSQPAGNQTSPGATEDYSYGSWYIDEPQGGEELQPEGEVPSCHTSIPPGLYHACLASLSILVLLLLAMLVRRRQLWPDCVRGRPGLPSPVDFLAGDRPRAVPAAVFMVLLSSLCLLLPDEDALPFLTLASAPSQDGKTEAPRGAWKILGLFYYAALYYPLAACATAGHTAAHLLGSTLSWAHLGVQVWQRAECPQVPKIYKYYSLLASLPLLLGLGFLSLWYPVQLVRSFSRRTGAGSKGLQSSYSEEYLRNLLCRKKLGSSYHTSKHGFLSWARVCLRHCIYTPQPGFHLPLKLVLSATLTGTAIYQVALLLLVGVVPTIQKVRAGVTTDVSYLLAGFGIVLSEDKQEVVELVKHHLWALEVCYISALVLSCLLTFLVLMRSLVTHRTNLRALHRGAALDLSPLHRSPHPSRQAIFCWMSFSAYQTAFICLGLLVQQIIFFLGTTALAFLVLMPVLHGRNLLLFRSLESSWPFWLTLALAVILQNMAAHWVFLETHDGHPQLTNRRVLYAATFLLFPLNVLVGAMVATWRVLLSALYNAIHLGQMDLSLLPPRAATLDPGYYTYRNFLKIEVSQSHPAMTAFCSLLLQAQSLLPRTMAAPQDSLRPGEEDEGMQLLQTKDSMAKGARPGASRGRARWGLAYTLLHNPTLQVFRKTALLGANGAQP

SEQ ID NO: 952 - protein, 273 aa, Homo sapiens
MIFLLLMLSLELQLHQIAALFTVTVPKELYIIEHGSNVTLECNFDTGSHVNLGAITASLQKVENDTSPHRERATLLEEQLPLGKASFHIPQVQVRDEGQYQCIIIYGVAWDYKYLTLKVKASYRKINTHILKVPETDEVELTCQATGYPLAEVSWPNVSVPANTSHSRTPEGLYQVTSVLRLKPPPGRNFSCVFWNTHVRELTLASIDLQSQMEPRTHPTWLLHIFIPFCIIAFIFIATVIALRKQLCQKLYSSKDTTKRPVTTTKREVNSAI

SEQ ID NO: 953 - protein, 183 aa, Homo sapiens
MIFLLLMLSLELQLHQIAALFTVTVPKELYIIEHGSNVTLECNFDTGSHVNLGAITASLQKVENDTSPHRERATLLEEQLPLGKASFHIPQVQVRDEGQYQCIIIYGVAWDYKYLTLKVKGQMEPRTHPTWLLHIFIPFCIIAFIFIATVIALRKQLCQKLYSSKDTTKRPVTTTKREVNSAI

SEQ ID NO: 954 - protein, 182 aa, Homo sapiens
MIFLLLMLSLELQLHQIAALFTVTVPKELYIIEHGSNVTLECNFDTGSHVNLGAITASLQKVENDTSPHRERATLLEEQLPLGKASFHIPQVQVRDEGQYQCIIIYGVAWDYKYLTLKVKDGTQDPSNLAASHFHPLLHHCFHFHSHSDSPKKTTLSKAVFFKRHNKKTCHHNKEGSEQCYL

SEQ ID NO: 955 - protein, 290 aa, Homo sapiens
MRIFAVFIFMTYWHLLNAFTVTVPKDLYVVEYGSNMTIECKFPVEKQLDLAALIVYWEMEDKNIIQFVHGEEDLKVQHSSYRQRARLLKDQLSLGNAALQITDVKLQDAGVYRCMISYGGADYKRITVKVNAPYNKINQRILVVDPVTSEHELTCQAEGYPKAEVIWTSSDHQVLSGKTTTTNSKREEKLFNVTSTLRINTTTNEIFYCTFRRLDPEENHTAELVIPELPLAHPPNERTHLVILGAILLCLGVALTFIFRLRKGRMMDVKKCGIQDTNSKKQSDTHLEET

SEQ ID NO: 956 - protein, 176 aa, Homo sapiens
MRIFAVFIFMTYWHLLNAPYNKINQRILVVDPVTSEHELTCQAEGYPKAEVIWTSSDHQVLSGKTTTTNSKREEKLFNVTSTLRINTTTNEIFYCTFRRLDPEENHTAELVIPELPLAHPPNERTHLVILGAILLCLGVALTFIFRLRKGRMMDVKKCGIQDTNSKKQSDTHLEET

SEQ ID NO: 957 - protein, 178 aa, Homo sapiens
MRIFAVFIFMTYWHLLNAFTVTVPKDLYVVEYGSNMTIECKFPVEKQLDLAALIVYWEMEDKNIIQFVHGEEDLKVQHSSYRQRARLLKDQLSLGNAALQITDVKLQDAGVYRCMISYGGADYKRITVKVNAPYNKINQRILVVDPVTSEHELTCQAEGYPKAEVIWTSSDHQVLSGD

SEQ ID NO: 958 - protein, 277 aa, Homo sapiens
MVRLPLQCVLWGCLLTAVHPEPPTACREKQYLINSQCCSLCQPGQKLVSDCTEFTETECLPCGESEFLDTWNRETHCHQHKYCDPNLGLRVQQKGTSETDTICTCEEGWHCTSEACESCVLHRSCSPGFGVKQIATGVSDTICEPCPVGFFSNVSSAFEKCHPWTSCETKDLVVQQAGTNKTDVVCGPQDRLRALVVIPIIFGILFAILLVLVFIKKVAKKPTNKAPHPKQEPQEINFPDDLPGSNTAAPVQETLHGCQPVTQEDGKESRISVQERQ

SEQ ID NO: 959 - protein, 203 aa, Homo sapiens
MVRLPLQCVLWGCLLTAVHPEPPTACREKQYLINSQCCSLCQPGQKLVSDCTEFTETECLPCGESEFLDTWNRETHCHQHKYCDPNLGLRVQQKGTSETDTICTCEEGWHCTSEACESCVLHRSCSPGFGVKQIATGVSDTICEPCPVGFFSNVSSAFEKCHPWTRSPGSAESPGGDPHHLRDPVCHPLGAGLYQKGGQEANQ

SEQ ID NO: 960 - protein, 1722 aa, Homo sapiens
MRTGWATPRRPAGLLMLLFWFFDLAEPSGRAANDPFTIVHGNTGKCIKPVYGWIVADDCDETEDKLWKWVSQHRLFHLHSQKCLGLDITKSVNELRMFSCDSSAMLWWKCEHHSLYGAARYRLALKDGHGTAISNASDVWKKGGSEESLCDQPYHEIYTRDGNSYGRPCEFPFLIDGTWHHDCILDEDHSGPWCATTLNYEYDRKWGICLKPENGCEDNWEKNEQFGSCYQFNTQTALSWKEAYVSCQNQGADLLSINSAAELTYLKEKEGIAKIFWIGLNQLYSARGWEWSDHKPLNFLNWDPDRPSAPTIGGSSCARMDAESGLWQSFSCEAQLPYVCRKPLNNTVELTDVWTYSDTRCDAGWLPNNGFCYLLVNESNSWDKAHAKCKAFSSDLISIHSLADVEVVVTKLHNEDIKEEVWIGLKNINIPTLFQWSDGTEVTLTYWDENEPNVPYNKTPNCVSYLGELGQWKVQSCEEKLKYVCKRKGEKLNDASSDKMCPPDEGWKRHGETCYKIYEDEVPFGTNCNLTITSRFEQEYLNDLMKKYDKSLRKYFWTGLRDVDSCGEYNWATVGGRRRAVTFSNWNFLEPASPGGCVAMSTGKSVGKWEVKDCRSFKALSICKKMSGPLGPEEASPKPDDPCPEGWQSFPASLSCYKVFHAERIVRKRNWEEAERFCQALGAHLSSFSHVDEIKEFLHFLTDQFSGQHWLWIGLNKRSPDLQGSWQWSDRTPVSTIIMPNEFQQDYDIRDCAAVKVFHRPWRRGWHFYDDREFIYLRPFACDTKLEWVCQIPKGRTPKTPDWYNPDRAGIHGPPLIIEGSEYWFVADLHLNYEEAVLYCASNHSFLATITSFVGLKAIKNKIANISGDGQKWWIRISEWPIDDHFTYSRYPWHRFPVTFGEECLYMSAKTWLIDLGKPTDCSTKLPFICEKYNVSSLEKYSPDSAAKVQCSEQWIPFQNKCFLKIKPVSLTFSQASDTCHSYGGTLPSVLSQIEQDFITSLLPDMEATLWIGLRWTAYEKINKWTDNRELTYSNFHPLLVSGRLRIPENFFEEESRYHCALILNLQKSPFTGTWNFTSCSERHFVSLCQKYSEVKSRQTLQNASETVKYLNNLYKIIPKTLTWHSAKRECLKSNMQLVSITDPYQQAFLSVQALLHNSSLWIGLFSQDDELNFGWSDGKRLHFSRWAETNGQLEDCVVLDTDGFWKTVDCNDNQPGAICYYSGNETEKEVKPVDSVKCPSPVLNTPWIPFQNCCYNFIITKNRHMATTQDEVHTKCQKLNPKSHILSIRDEKENNFVLEQLLYFNYMASWVMLGITYRNKSLMWFDKTPLSYTHWRAGRPTIKNEKFLAGLSTDGFWDIQTFKVIEEAVYFHQHSILACKIEMVDYKEEYNTTLPQFMPYEDGIYSVIQKKVTWYEALNMCSQSGGHLASVHNQNGQLFLEDIVKRDGFPLWVGLSSHDGSESSFEWSDGSTFDYIPWKGQTSPGNCVLLDPKGTWKHEKCNSVKDGAICYKPTKSKKLSRLTYSSRCPAAKENGSRWIQYKGHCYKSDQALHSFSEAKKLCSKHDHSATIVSIKDEDENKFVSRLMRENNNITMRVWLGLSQHSVDQSWSWLDGSEVTFVKWENKSKSGVGRCSMLIASNETWKKVECEHGFGRVVCKVPLGPDYTAIAIIVATLSILVLMGGLIWFLFQRHRLHLAGFSSVRYAQGVNEDEIMLPSFHD

SEQ ID NO: 961 - protein, 1873 aa, Homo sapiens
MRTGWATPRRPAGLLMLLFWFFDLAEPSGRAANDPFTIVHGNTGKCIKPVYGWIVADDCDETEDKLWKWVSQHRLFHLHSQKCLGLDITKSVNELRMFSCDSSAMLWWKCEHHSLYGAARYRLALKDGHGTAISNASDVWKKGGSEESLCDQPYHEIYTRDGNSYGRPCEFPFLIDGTWHHDCILDEDHSGPWCATTLNYEYDRKWGICLKPENGCEDNWEKNEQFGSCYQFNTQTALSWKEAYVSCQNQGADLLSINSAAELTYLKEKEGIAKIFWIGLNQLYSARGWEWSDHKPLNFLNWDPDRPSAPTIGGSSCARMDAESGLWQSFSCEAQLPYVCRKPLNNTVELTDVWTYSDTRCDAGWLPNNGFCYLLVNESNSWDKAHAKCKAFSSDLISIHSLADVEVVVTKLHNEDIKEEVWIGLKNINIPTLFQWSDGTEVTLTYWDENEPNVPYNKTPNCVSYLGELGQWKVQSCEEKLKYVCKRKGEKLNDASSDKMCPPDEGWKRHGETCYKIYEDEVPFGTNCNLTITSRFEQEYLNDLMKKYDKSLRKYFWTGLRDVDSCGEYNWATVGGRRRAVTFSNWNFLEPASPGGCVAMSTGKSVGKWEVKDCRSFKALSICKKMSGPLGPEEASPKPDDPCPEGWQSFPASLSCYKVFHAERIVRKRNWEEAERFCQALGAHLSSFSHVDEIKEFLHFLTDQFSGQHWLWIGLNKRSPDLQGSWQWSDRTPVSTIIMPNEFQQDYDIRDCAAVKVFHRPWRRGWHFYDDREFIYLRPFACDTKLEWVCQIPKGRTPKTPDWYNPDRAGIHGPPLIIEGSEYWFVADLHLNYEEAVLYCASNHSFLATITSFVGLKAIKNKIANISGDGQKWWIRISEWPIDDHFTYSRYPWHRFPVTFGEECLYMSAKTWLIDLGKPTDCSTKLPFICEKYNVSSLEKYSPDSAAKVQCSEQWIPFQNKCFLKIKPVSLTFSQASDTCHSYGGTLPSVLSQIEQDFITSLLPDMEATLWIGLRWTAYEKINKWTDNRELTYSNFHPLLVSGRLRIPENFFEEESRYHCALILNLQKSPFTGTWNFTSCSERHFVSLCQKYSEVKSRQTLQNASETVKYLNNLYKIIPKTLTWHSAKRECLKSNMQLVSITDPYQQAFLSVQALLHNSSLWIGLFSQDDELNFGWSDGKRLHFSRWAETNGQLEDCVVLDTDGFWKTVDCNDNQPGAICYYSGNETEKEVKPVDSVKCPSPVLNTPWIPFQNCCYNFIITKNRHMATTQDEVHTKCQKLNPKSHILSIRDEKENNFVLEQLLYFNYMASWVMLGITYRNKSLMWFDKTPLSYTHWRAGRPTIKNEKFLAGLSTDGFWDIQTFKVIEEAVYFHQHSILACKIEMVDYKEEYNTTLPQFMPYEDGIYSVIQKKVTWYEALNMCSQSGGHLASVHNQNGQLFLEDIVKRDGFPLWVGLSSHDGSESSFEWSDGSTFDYIPWKGQTSPGNCVLLDPKGTWKHEKCNSVKDGAICYKPTKSKKLSRLTYSSRCPAAKENGSRWIQYKGHCYKSDQALHSFSEAKKLCSKHDHSATIVSIKDEDENKFVSRLMRENNNITMRVWLGLSQHSVDQSWSWLDGSEVTFVKWENKSKSGVGRCSMLIASNETWKKVECEHGFGRVVCKVPLDCPSSTWIQFQDSCYIFLQEAIKVESIEDVRNQCTDHGADMISIHNEEENAFILDTLKKQWKGPDDILLGMFYDTDDASFKWFDNSNMTFDKWTDQDDDEDLVDTCAFLHIKTGEWKKGNCEVSSVEGTLCKTAIPYKRKYLSDNHILISALVIASTVILTVLGAIIWFLYKKHSDSRFTTVFSTAPQSPYNEDCVLVVGEENEYPVQFD

SEQ ID NO: 962 - protein, 174 aa, Homo sapiens
MLRAALPALLLPLLGLAAAAVADCPSSTWIQFQDSCYIFLQEAIKVESIEDVRNQCTDHGADMISIHNEEENAFILDTLKKQWKGPDDILLGMFYDTDVPYKRKYLSDNHILISALVIASTVILTVLGAIIWFLYKKHSDSRFTTVFSTAPQSPYNEDCVLVVGEENEYPVQFD

SEQ ID NO: 963 - protein, 1817 aa, Homo sapiens
MRTGWATPRRPAGLLMLLFWFFDLAEPSGRAANDPFTIVHGNTGKCIKPVYGWIVADDCDETEDKLWKWVSQHRLFHLHSQKCLGLDITKSVNELRMFSCDSSAMLWWKCEHHSLYGAARYRLALKDGHGTAISNASDVWKKGGSEESLCDQPYHEIYTRDGNSYGRPCEFPFLIDGTWHHDCILDEDHSGPWCATTLNYEYDRKWGICLKPENGCEDNWEKNEQFGSCYQFNTQTALSWKEAYVSCQNQGADLLSINSAAELTYLKEKEGIAKIFWIGLNQLYSARGWEWSDHKPLNFLNWDPDRPSAPTIGGSSCARMDAESGLWQSFSCEAQLPYVCRKPLNNTVELTDVWTYSDTRCDAGWLPNNGFCYLLVNESNSWDKAHAKCKAFSSDLISIHSLADVEVVVTKLHNEDIKEEVWIGLKNINIPTLFQWSDGTEVTLTYWDENEPNVPYNKTPNCVSYLGELGQWKVQSCEEKLKYVCKRKGEKLNDASSDKMCPPDEGWKRHGETCYKIYEDEVPFGTNCNLTITSRFEQEYLNDLMKKYDKSLRKYFWTGLRDVDSCGEYNWATVGGRRRAVTFSNWNFLEPASPGGCVAMSTGKSVGKWEVKDCRSFKALSICKKMSGPLGPEEASPKPDDPCPEGWQSFPASLSCYKVFHAERIVRKRNWEEAERFCQALGAHLSSFSHVDEIKEFLHFLTDQFSGQHWLWIGLNKRSPDLQGSWQWSDRTPVSTIIMPNEFQQDYDIRDCAAVKVFHRPWRRGWHFYDDREFIYLRPFACDTKLEWVCQIPKGRTPKTPDWYNPDRAGIHGPPLIIEGSEYWFVADLHLNYEEAVLYCASNHSFLATITSFVGLKAIKNKIANISGDGQKWWIRISEWPIDDHFTYSRYPWHRFPVTFGEECLYMSAKTWLIDLGKPTDCSTKLPFICEKYNVSSLEKYSPDSAAKVQCSEQWIPFQNKCFLKIKPVSLTFSQASDTCHSYGGTLPSVLSQIEQDFITSLLPDMEATLWIGLRWTAYEKINKWTDNRELTYSNFHPLLVSGRLRIPENFFEEESRYHCALILNLQKSPFTGTWNFTSCSERHFVSLCQKYSEVKSRQTLQNASETVKYLNNLYKIIPKTLTWHSAKRECLKSNMQLVSITDPYQQAFLSVQALLHNSSLWIGLFSQDDELNFGWSDGKRLHFSRWAETNGQLEDCVVLDTDGFWKTVDCNDNQPGAICYYSGNETEKEVKPVDSVKCPSPVLNTPWIPFQNCCYNFIITKNRHMATTQDEVHTKCQKLNPKSHILSIRDEKENNFVLEQLLYFNYMASWVMLGITYRNKSLMWFDKTPLSYTHWRAGRPTIKNEKFLAGLSTDGFWDIQTFKVIEEAVYFHQHSILACKIEMVDYKEEYNTTLPQFMPYEDGIYSVIQKKVTWYEALNMCSQSGGHLASVHNQNGQLFLEDIVKRDGFPLWVGLSSHDGSESSFEWSDGSTFDYIPWKGQTSPGNCVLLDPKGTWKHEKCNSVKDGAICYKPTKSKKLSRLTYSSRCPAAKENGSRWIQYKGHCYKSDQALHSFSEAKKLCSKHDHSATIVSIKDEDENKFVSRLMRENNNITMRVWLGLSQHSVDCPSSTWIQFQDSCYIFLQEAIKVESIEDVRNQCTDHGADMISIHNEEENAFILDTLKKQWKGPDDILLGMFYDTDDASFKWFDNSNMTFDKWTDQDDDEDLVDTCAFLHIKTGEWKKGNCEVSSVEGTLCKTAIPYKRKYLSDNHILISALVIASTVILTVLGAIIWFLYKKHSDSRFTTVFSTAPQSPYNEDCVLVVGEENEYPVQFD

SEQ ID NO: 964 - protein, 232 aa, Homo sapiens
MLRAALPALLLPLLGLAAAAVADCPSSTWIQFQDSCYIFLQEAIKVESIEDVRNQCTDHGADMISIHNEEENAFILDTLKKQWKGPDDILLGMFYDTDDASFKWFDNSNMTFDKWTDQDDDEDLVDTCAFLHIKTGEWKKGNCEVSSVEGTLCKTAIPYKRKYLSDNHILISALVIASTVILTVLGAIIWFLYKKHSDSRFTTVFSTAPQSPYNEDCVLVVGEENEYPVQFD

SEQ ID NO: 965 - protein, 478 aa, Homo sapiens
MGRCCFYTAGTLSLLLLVTSVTLLVARVFQKAVDQSIEKKIVLRNGTEAFDSWEKPPLPVYTQFYFFNVTNPEEILRGETPRVEEVGPYTYRELRNKANIQFGDNGTTISAVSNKAYVFERDQSVGDPKIDLIRTLNIPVLTVIEWSQVHFLREIIEAMLKAYQQKLFVTHTVDELLWGYKDEILSLIHVFRPDISPYFGLFYEKNGTNDGDYVFLTGEDSYLNFTKIVEWNGKTSLDWWITDKCNMINGTDGDSFHPLITKDEVLYVFPSDFCRSVYITFSDYESVQGLPAFRYKVPAEILANTSDNAGFCIPEGNCLGSGVLNVSICKNGAPIIMSFPHFYQADERFVSAIEGMHPNQEDHETFVDINPLTGIILKAAKRFQINIYVKKLDDFVETGDIRTMVFPVMYLNESVHIDKETASRLKSMINTTLIITNIPYIIMALGVFFGLVFTWLACKGQGSMDEGTADERAPLIRT

SEQ ID NO: 966 - protein, 335 aa, Homo sapiens
MGRCCFYTAGTLSLLLLVTSVTLLVARVFQKAVDQSIEKKIVLRNGTEAFDSWEKPPLPVYTQFYFFNVTNPEEILRGETPRVEEVGPYTYRSLDWWITDKCNMINGTDGDSFHPLITKDEVLYVFPSDFCRSVYITFSDYESVQGLPAFRYKVPAEILANTSDNAGFCIPEGNCLGSGVLNVSICKNGAPIIMSFPHFYQADERFVSAIEGMHPNQEDHETFVDINPLTGIILKAAKRFQINIYVKKLDDFVETGDIRTMVFPVMYLNESVHIDKETASRLKSMINTTLIITNIPYIIMALGVFFGLVFTWLACKGQGSMDEGTADERAPLIRT

SEQ ID NO: 967 - protein, 241 aa, Homo sapiens
MHEEEIYTSLQWDSPAPDTYQKCLSSNKCSGACCLVMVISCVFCMGLLTASIFLGVKLLQVSTIAMQQQEKLIQQERALLNFTEWKRSCALQMKYCQAFMQNSLSSAHNSSPCPNNWIQNRESCYYVSEIWSIWHTSQENCLKEGSTLLQIESKEEMDFITGSLRKIKGSYDYWVGLSQDGHSGRWLWQDGSSPSPGLLPAERSQSANQVCGYVKSNSLLSSNCSTWKYFICEKYALRSSV

SEQ ID NO: 968 - protein, 404 aa, Homo sapiens
MSDSKEPRLQQLGLLEEEQLRGLGFRQTRGYKSLAGCLGHGPLVLQLLSFTLLAGLLVQVSKVPSSISQEQSRQDAIYQNLTQLKAAVGELSEKSKLQEIYQELTQLKAAVGELPEKSKLQEIYQELTRLKAAVGELPEKSKLQEIYQELTWLKAAVGELPEKSKMQEIYQELTRLKAAVGELPEKSKQQEIYQELTRLKAAVGELPEKSKQQEIYQELTRLKAAVGELPEKSKQQEIYQELTQLKAAVERLCHPCPWEWTFFQGNCYFMSNSQRNWHDSITACKEVGAQLVVIKSAEEQNFLQLQSSRSNRFTWMGLSDLNQEGTWQWVDGSPLLPSFKQYWNRGEPNNVGEEDCAEFSGNGWNDDKCNLAKFWICKKSAASCSRDEEQFLSPAPATPNPPPA

SEQ ID NO: 969 - protein, 398 aa, Homo sapiens
MSDSKEPRLQQLGLLEEEQLRGLGFRQTRGYKSLAGCLGHGPLVLQLLSFTLLAGLLVQVSKVPSSISQEQSRQDAIYQNLTQLKAAVGELSEKSKLQEIYQELTQLKAAVGELPEKSKLQEIYQELTRLKAAVGELPEKSKLQEIYQELTWLKAAVGELPEKSKMQEIYQELTRLKAAVGELPEKSKQQEIYQELTRLKAAVGELPEKSKQQEIYQELTRLKAAVGELPEKSKQQEIYQELTQLKAAVERLCHPCPWEWTFFQGNCYFMSNSQRNWHDSITACKEVGAQLVVIKSAEEQSSRSNRFTWMGLSDLNQEGTWQWVDGSPLLPSFKQYWNRGEPNNVGEEDCAEFSGNGWNDDKCNLAKFWICKKSAASCSRDEEQFLSPAPATPNPPPA

SEQ ID NO: 970 - protein, 312 aa, Homo sapiens
MSDSKEPRLQQLGLLEEEQLRGLGFRQTRGYKSLAGCLGHGPLVLQLLSFTLLAGLLVQVSKVPSSISQEQSRQDAIYQNLTQLKAAVGELSEKSKLQEIYQELTQLKAAVGELPEKSKLQEIYQELTRLKAAVGELPEKSKLQEIYQELTWLKAAVERLCHPCPWEWTFFQGNCYFMSNSQRNWHDSITACKEVGAQLVVIKSAEEQNFLQLQSSRSNRFTWMGLSDLNQEGTWQWVDGSPLLPSFKQYWNRGEPNNVGEEDCAEFSGNGWNDDKCNLAKFWICKKSAASCSRDEEQFLSPAPATPNPPPA

SEQ ID NO: 971 - protein, 168 aa, Homo sapiens
MSDSKEPRLQQLGLLEEEQLRGLGFRQTRGYKSLAGCLGHGPLVLQLLSFTLLAGLLVQVSKVPSSISQEQSRSNRFTWMGLSDLNQEGTWQWVDGSPLLPSFKQYWNRGEPNNVGEEDCAEFSGNGWNDDKCNLAKFWICKKSAASCSRDEEQFLSPAPATPNPPPA

SEQ ID NO: 972 - protein, 404 aa, Homo sapiens
MASACPGSDFTSIHSEEEQLRGLGFRQTRGYKSLAGCLGHGPLVLQLLSFTLLAGLLVQVSKVPSSISQEQSRQDAIYQNLTQLKAAVGELSEKSKLQEIYQELTQLKAAVGELPEKSKLQEIYQELTRLKAAVGELPEKSKLQEIYQELTWLKAAVGELPEKSKMQEIYQELTRLKAAVGELPEKSKQQEIYQELTRLKAAVGELPEKSKQQEIYQELTRLKAAVGELPEKSKQQEIYQELTQLKAAVERLCHPCPWEWTFFQGNCYFMSNSQRNWHDSITACKEVGAQLVVIKSAEEQNFLQLQSSRSNRFTWMGLSDLNQEGTWQWVDGSPLLPSFKQYWNRGEPNNVGEEDCAEFSGNGWNDDKCNLAKFWICKKSAASCSRDEEQFLSPAPATPNPPPA

SEQ ID NO: 973 - protein, 380 aa, Homo sapiens
MSDSKEPRLQQLGLLEEEQLRGLGFRQTRGYKSLAVSKVPSSISQEQSRQDAIYQNLTQLKAAVGELSEKSKLQEIYQELTQLKAAVGELPEKSKLQEIYQELTRLKAAVGELPEKSKLQEIYQELTWLKAAVGELPEKSKMQEIYQELTRLKAAVGELPEKSKQQEIYQELTRLKAAVGELPEKSKQQEIYQELTRLKAAVGELPEKSKQQEIYQELTQLKAAVERLCHPCPWEWTFFQGNCYFMSNSQRNWHDSITACKEVGAQLVVIKSAEEQNFLQLQSSRSNRFTWMGLSDLNQEGTWQWVDGSPLLPSFKQYWNRGEPNNVGEEDCAEFSGNGWNDDKCNLAKFWICKKSAASCSRDEEQFLSPAPATPNPPPA

SEQ ID NO: 974 - protein, 360 aa, Homo sapiens
MSDSKEPRLQQLGLLVSKVPSSISQEQSRQDAIYQNLTQLKAAVGELSEKSKLQEIYQELTQLKAAVGELPEKSKLQEIYQELTRLKAAVGELPEKSKLQEIYQELTWLKAAVGELPEKSKMQEIYQELTRLKAAVGELPEKSKQQEIYQELTRLKAAVGELPEKSKQQEIYQELTRLKAAVGELPEKSKQQEIYQELTQLKAAVERLCHPCPWEWTFFQGNCYFMSNSQRNWHDSITACKEVGAQLVVIKSAEEQNFLQLQSSRSNRFTWMGLSDLNQEGTWQWVDGSPLLPSFKQYWNRGEPNNVGEEDCAEFSGNGWNDDKCNLAKFWICKKSAASCSRDEEQFLSPAPATPNPPPA

SEQ ID NO: 975 - protein, 268 aa, Homo sapiens
MSDSKEPRLQQLGLLVSKVPSSISQEQSRQDAIYQNLTQLKAAVGELSEKSKLQEIYQELTQLKAAVGELPEKSKLQEIYQELTRLKAAVGELPEKSKQQEIYQELTQLKAAVERLCHPCPWEWTFFQGNCYFMSNSQRNWHDSITACKEVGAQLVVIKSAEEQNFLQLQSSRSNRFTWMGLSDLNQEGTWQWVDGSPLLPSFKQYWNRGEPNNVGEEDCAEFSGNGWNDDKCNLAKFWICKKSAASCSRDEEQFLSPAPATPNPPPA

SEQ ID NO: 976 - protein, 34 aa, Homo sapiens
MSDSKEPRLQQLGLLEEEQLRGLGFRQTRRNQKC

SEQ ID NO: 977 - protein, 380 aa, Homo sapiens
MASACPGSDFTSIHSEEEQLRGLGFRQTRGYKSLAVSKVPSSISQEQSRQDAIYQNLTQLKAAVGELSEKSKLQEIYQELTQLKAAVGELPEKSKLQEIYQELTRLKAAVGELPEKSKLQEIYQELTWLKAAVGELPEKSKMQEIYQELTRLKAAVGELPEKSKQQEIYQELTRLKAAVGELPEKSKQQEIYQELTRLKAAVGELPEKSKQQEIYQELTQLKAAVERLCHPCPWEWTFFQGNCYFMSNSQRNWHDSITACKEVGAQLVVIKSAEEQNFLQLQSSRSNRFTWMGLSDLNQEGTWQWVDGSPLLPSFKQYWNRGEPNNVGEEDCAEFSGNGWNDDKCNLAKFWICKKSAASCSRDEEQFLSPAPATPNPPPA

SEQ ID NO: 978 - protein, 334 aa, Homo sapiens
MASACPGSDFTSIHSEEEQLRGLGFRQTRGYKSLAVSKVPSSISQEQSRQDAIYQNLTQLKAAVGELSEKSKLQEIYQELTQLKAAVGELPEKSKLQEIYQELTRLKAAVGELPEKSKLQEIYQELTWLKAAVGELPEKSKMQEIYQELTRLKAAVGELPEKSKQQEIYQELTQLKAAVERLCHPCPWEWTFFQGNCYFMSNSQRNWHDSITACKEVGAQLVVIKSAEEQNFLQLQSSRSNRFTWMGLSDLNQEGTWQWVDGSPLLPSFKQYWNRGEPNNVGEEDCAEFSGNGWNDDKCNLAKFWICKKSAASCSRDEEQFLSPAPATPNPPPA

SEQ ID NO: 979 - protein, 297 aa, Homo sapiens
MASACPGSDFTSIHSEEEQLRGLGFRQTRGYKSLAVSKVPSSISQEQSRQDAIYQNLTQLKAAVGELSEKSKLQEIYQELTQLKAAVGELPEKSKLQEIYQELTRLKAAVGELPEKSKLQEIYQELTWLKAAVGELPEKSKMQEIYQELTRLKAAVGELPEKSKQQEIYQELTRLKAAVGELPEKSKQQEIYQELTRLKAAVGELPEKSKQQEIYQELTQLKAAVERLCHPCPWEWTFFQGNCYFMSNSQRNWHDSITACKEVGAQLVVIKSAEEQLQAVLEQRRAQQRWGGRLRGI

SEQ ID NO: 980 - protein, 265 aa, Homo sapiens
MSEEVTYADLQFQNSSEMEKIPEIGKFGEKAPPAPSHVWRPAALFLTLLCLLLLIGLGVLASMFHVTLKIEMKKMNKLQNISEELQRNISLQLMSNMNISNKIRNLSTTLQTIATKLCRELYSKEQEHKCKPCPRRWIWHKDSCYFLSDDVQTWQESKMACAAQNASLLKINNKNALEFIKSQSRSYDYWLGLSPEEDSTRGMRVDNIINSSAWVIRNAPDLNNMYCGYINRLYVQYYHCTYKKRMICEKMANPVQLGSTYFREA

SEQ ID NO: 981 - protein, 275 aa, Homo sapiens
MWIDFFTYSSMSEEVTYADLQFQNSSEMEKIPEIGKFGEKAPPAPSHVWRPAALFLTLLCLLLLIGLGVLASMFHVTLKIEMKKMNKLQNISEELQRNISLQLMSNMNISNKIRNLSTTLQTIATKLCRELYSKEQEHKCKPCPRRWIWHKDSCYFLSDDVQTWQESKMACAAQNASLLKINNKNALEFIKSQSRSYDYWLGLSPEEDSTRGMRVDNIINSSAWVIRNAPDLNNMYCGYINRLYVQYYHCTYKKRMICEKMANPVQLGSTYFREA

SEQ ID NO: 982 - protein, 81 aa, Homo sapiens
MSEEVTYADLQFQNSSEMEKIPEIGKFGEKAPPAPSHVWRPAALFLTLLCLLLLIGLGVLASMCMYCPCFGQEEVSRISNI

SEQ ID NO: 983 - protein, 232 aa, Homo sapiens
MSEEVTYADLQFQNSSEMEKIPEIGKFGEKVHVTLKIEMKKMNKLQNISEELQRNISLQLMSNMNISNKIRNLSTTLQTIATKLCRELYSKEQEHKCKPCPRRWIWHKDSCYFLSDDVQTWQESKMACAAQNASLLKINNKNALEFIKSQSRSYDYWLGLSPEEDSTRGMRVDNIINSSAWVIRNAPDLNNMYCGYINRLYVQYYHCTYKKRMICEKMANPVQLGSTYFREA

SEQ ID NO: 984 - protein, 213 aa, Homo sapiens
MSEEVTYADLQFQNSSEMEKIPEIGKFGEKAPPAPSHVWRPAALFLTLLCLLLLIGLGVLASMFHVTLKIEMKKMNKLQNISEELQRNISLQLMSNMNISNKIRNLSTTLQTIATKLCRELYSKEQEHKCKPCPRRWIWHKDSCYFLSDDVQTWQESKMACAAQNASLLKINNKNALEFIKSQSRSYDYWLGLSPEEDSTRGMRVDNIINSSA

SEQ ID NO: 985 - protein, 213 aa, Homo sapiens
MVPEEEPQDREKGLWWFQLKVWSMAVVSILLLSVCFTVSSVVPHNFMYSKTVKRLSKLREYQQYHPSLTCVMEGKDIEDWSCCPTPWTSFQSSCYFISTGMQSWTKSQKNCSVMGADLVVINTREEQDFIIQNLKRNSSYFLGLSDPGGRRHWQWVDQTPYNENVTFWHSGEPNNLDERCAIINFRSSEEWGWNDIHCHVPQKSICKMKKIYI

SEQ ID NO: 986 - protein, 182 aa, Homo sapiens
MVPEEEPQDRVPHNFMYSKTVKRLSKLREYQQYHPSLTCVMEGKDIEDWSCCPTPWTSFQSSCYFISTGMQSWTKSQKNCSVMGADLVVINTREEQDFIIQNLKRNSSYFLGLSDPGGRRHWQWVDQTPYNENVTFWHSGEPNNLDERCAIINFRSSEEWGWNDIHCHVPQKSICKMKKIYI

SEQ ID NO: 987 - protein, 183 aa, Homo sapiens
MERVQPLEENVGNAARPRFERNKLLLVASVIQGLGLLLCFTYICLHFSALQVSHRYPRIQSIKVQFTEYKKEKGFILTSQKEDEIMKVQNNSVIINCDGFYLISLKGYFSQEVNISLHYQKDEEPLFQLKKVRSVNSLMVASLTYKDKVYLNVTTDNTSLDDFHVNGGELILIHQNPGEFCVL

SEQ ID NO: 988 - protein, 133 aa, Homo sapiens
MVSHRYPRIQSIKVQFTEYKKEKGFILTSQKEDEIMKVQNNSVIINCDGFYLISLKGYFSQEVNISLHYQKDEEPLFQLKKVRSVNSLMVASLTYKDKVYLNVTTDNTSLDDFHVNGGELILIHQNPGEFCVL

SEQ ID NO: 989 - protein, 254 aa, Homo sapiens
MEYASDASLDPEAPWPPAPRARACRVLPWALVAGLLLLLLLAAACAVFLACPWAVSGARASPGSAASPRLREGPELSPDDPAGLLDLRQGMFAQLVAQNVLLIDGPLSWYSDPGLAGVSLTGGLSYKEDTKELVVAKAGVYYVFFQLELRRVVAGEGSGSVSLALHLQPLRSAAGAAALALTVDLPPASSEARNSAFGFQGRLLHLSAGQRLGVHLHTEARARHAWQLTQGATVLGLFRVTPEIPAGLPSPRSE

SEQ ID NO: 990 - protein, 451 aa, Homo sapiens
MEQWDHFHNQQEDTDSCSESVKFDARSMTALLPPNPKNSPSLQEKLKSFKAALIALYLLVFAVLIPLIGIVAAQLLKWETKNCSVSSTNANDITQSLTGKGNDSEEEMRFQEVFMEHMSNMEKRIQHILDMEANLMDTEHFQNFSMTTDQRFNDILLQLSTLFSSVQGHGNAIDEISKSLISLNTTLLDLQLNIENLNGKIQENTFKQQEEISKLEERVYNVSAEIMAMKEEQVHLEQEIKGEVKVLNNITNDLRLKDWEHSQTLRNITLIQGPPGPPGEKGDRGPTGESGPRGFPGPIGPPGLKGDRGAIGFPGSRGLPGYAGRPGNSGPKGQKGEKGSGNTLTPFTKVRLVGGSGPHEGRVEILHSGQWGTICDDRWEVRVGQVVCRSLGYPGVQAVHKAAHFGQGTGPIWLNEVFCFGRESSIEECKIRQWGTRACSHSEDAGVTCTL

SEQ ID NO: 991 - protein, 358 aa, Homo sapiens
MEQWDHFHNQQEDTDSCSESVKFDARSMTALLPPNPKNSPSLQEKLKSFKAALIALYLLVFAVLIPLIGIVAAQLLKWETKNCSVSSTNANDITQSLTGKGNDSEEEMRFQEVFMEHMSNMEKRIQHILDMEANLMDTEHFQNFSMTTDQRFNDILLQLSTLFSSVQGHGNAIDEISKSLISLNTTLLDLQLNIENLNGKIQENTFKQQEEISKLEERVYNVSAEIMAMKEEQVHLEQEIKGEVKVLNNITNDLRLKDWEHSQTLRNITLIQGPPGPPGEKGDRGPTGESGPRGFPGPIGPPGLKGDRGAIGFPGSRGLPGYAGRPGNSGPKGQKGEKGSGNTLRPVQLTDHIRAGPS

SEQ ID NO: 992 - protein, 388 aa, Homo sapiens
MEQWDHFHNQQEDTDSCSESVKFDARSMTALLPPNPKNSPSLQEKLKSFKAALIALYLLVFAVLIPLIGIVAAQLLKWETKNCSVSSTNANDITQSLTGKGNDSEEEMRFQEVFMEHMSNMEKRIQHILDMEANLMDTEHFQNFSMTTDQRFNDILLQLSTLFSSVQGHGNAIDEISKSLISLNTTLLDLQLNIENLNGKIQENTFKQQEEISKLEERVYNVSAEIMAMKEEQVHLEQEIKGEVKVLNNITNDLRLKDWEHSQTLRNITLIQGPPGPPGEKGDRGPTGESGPRGFPGPIGPPGLKGDRGAIGFPGSRGLPGYAGRPGNSGPKGQKGEKGSGNTLSTGPIWLNEVFCFGRESSIEECKIRQWGTRACSHSEDAGVTCTL

SEQ ID NO: 993 - protein, 520 aa, Homo sapiens
MRNKKILKEDELLSETQQAAFHQIAMEPFEINVPKPKRRNGVNFSLAVVVIYLILLTAGAGLLVVQVLNLQARLRVLEMYFLNDTLAAEDSPSFSLLQSAHPGEHLAQGASRLQVLQAQLTWVRVSHEHLLQRVDNFTQNPGMFRIKGEQGAPGLQGHKGAMGMPGAPGPPGPPAEKGAKGAMGRDGATGPSGPQGPPGVKGEAGLQGPQGAPGKQGATGTPGPQGEKGSKGDGGLIGPKGETGTKGEKGDLGLPGSKGDRGMKGDAGVMGPPGAQGSKGDFGRPGPPGLAGFPGAKGDQGQPGLQGVPGPPGAVGHPGAKGEPGSAGSPGRAGLPGSPGSPGATGLKGSKGDTGLQGQQGRKGESGVPGPAGVKGEQGSPGLAGPKGAPGQAGQKGDQGVKGSSGEQGVKGEKGERGENSVSVRIVGSSNRGRAEVYYSGTWGTICDDEWQNSDAIVFCRMLGYSKGRALYKVGAGTGQIWLDNVQCRGTESTLWSCTKNSWGHHDCSHEEDAGVECSV

SEQ ID NO: 994 - protein, 442 aa, Homo sapiens
MYFLNDTLAAEDSPSFSLLQSAHPGEHLAQGASRLQVLQAQLTWVRVSHEHLLQRVDNFTQNPGMFRIKGEQGAPGLQGHKGAMGMPGAPGPPGPPAEKGAKGAMGRDGATGPSGPQGPPGVKGEAGLQGPQGAPGKQGATGTPGPQGEKGSKGDGGLIGPKGETGTKGEKGDLGLPGSKGDRGMKGDAGVMGPPGAQGSKGDFGRPGPPGLAGFPGAKGDQGQPGLQGVPGPPGAVGHPGAKGEPGSAGSPGRAGLPGSPGSPGATGLKGSKGDTGLQGQQGRKGESGVPGPAGVKGEQGSPGLAGPKGAPGQAGQKGDQGVKGSSGEQGVKGEKGERGENSVSVRIVGSSNRGRAEVYYSGTWGTICDDEWQNSDAIVFCRMLGYSKGRALYKVGAGTGQIWLDNVQCRGTESTLWSCTKNSWGHHDCSHEEDAGVECSV

SEQ ID NO: 995 - protein, 188 aa, Homo sapiens
MNWHMIISGLIVVVLKVVGMTLFLLYFPQIFNKSNDGFTTTRSYGTVSQIFGSSSPSPNGFITTRSYGTVCPKDWEFYQARCFFLSTSESSWNESRDFCKGKGSTLAIVNTPEKLKFLQDITDAEKYFIGLIYHREEKRWRWINNSVFNGNVTNQNQNFNCATIGLTKTFDAASCDISYRRICEKNAK

SEQ ID NO: 996 - protein, 187 aa, Homo sapiens
MNWHMIISGLIVVVLKVVGMTLFLLYFPQIFNKSNDGFTTTRSYGTVSQIFGSSSPSPNGFITTRSYGTVCPKDWEFYQARCFFLSTSESSWNESRDFCKGKGSTLAIVNTPEKLFLQDITDAEKYFIGLIYHREEKRWRWINNSVFNGNVTNQNQNFNCATIGLTKTFDAASCDISYRRICEKNAK

SEQ ID NO: 997 - protein, 247 aa, Homo sapiens
MEYHPDLENLDEDGYTQLHFDSQSNTRIAVVSEKGSCAASPPWRLIAVILGILCLVILVIAVVLGTMAIWRSNSGSNTLENGYFLSRNKENHSQPTQSSLEDSVTPTKAVKTTGVLSSPCPPNWIIYEKSCYLFSMSLNSWDGSKRQCWQLGSNLLKIDSSNELGFIVKQVSSQPDNSFWIGLSRPQTEVPWLWEDGSTFSSNLFQIRTTATQENPSPNCVWIHVSVIYDQLCSVPSYSICEKKFSM

SEQ ID NO: 998 - protein, 201 aa, Homo sapiens
MEYHPDLENLDEDGYTQLHFDSQSNTRIAVVSEKGSCAASPPWRLIAVILGILCLVILVIAVVLGTMGVLSSPCPPNWIIYEKSCYLFSMSLNSWDGSKRQCWQLGSNLLKIDSSNELGFIVKQVSSQPDNSFWIGLSRPQTEVPWLWEDGSTFSSNLFQIRTTATQENPSPNCVWIHVSVIYDQLCSVPSYSICEKKFSM

SEQ ID NO: 999 - protein, 189 aa, Homo sapiens
MEYHPDLENLDEDGYTQLHFDSQSNTRIAVVSEKGSCAASPPWRLIAVILGILCLVILVIAVVLGTMAIWRSNSGSNTLENGYFLSRNKENHSQPTQSSLEDSVTPTKAVKTTGVLSSPCPPNWIIYEKSCYLFSMSLNSWDGSKRQCWQLGSNLLKIDSSNELISDQNHSYPRKPISKLCMDSRVSHL

SEQ ID NO: 1000 - protein, 192 aa, Homo sapiens
MEYHPDLENLDEDGYTQLHFDSQSNTRIAVVSEKGSCAASPPWRLIAVILGILCLVILVIAVVLGTMAIWRSNSGSNTLENGYFLSRNKENHSQPTQSSLEDSVTPTKAVKTTGVLSSPCPPNWIIYEKSCYLFSMSLNSWDGSKRQCWQLGSNLLKIDSSNELSLTLLPKLECSEAATSQAQVILPPQLPE

SEQ ID NO: 1001 - protein, 168 aa, Homo sapiens
MEYHPDLENLDEDGYTQLHFDSQSNTRIAVVSEKGVLSSPCPPNWIIYEKSCYLFSMSLNSWDGSKRQCWQLGSNLLKIDSSNELGFIVKQVSSQPDNSFWIGLSRPQTEVPWLWEDGSTFSSNLFQIRTTATQENPSPNCVWIHVSVIYDQLCSVPSYSICEKKFSM

SEQ ID NO: 1002 - protein, 132 aa, Homo sapiens
MEYHPDLENLDEDGYTQLHFDSQSNTRIAVVSEKGSCAASPPWRLIAVILGILCLVILVIAVVLGTMGVLSSPCPPNWIIYEKSCYLFSMSLNSWDGSKRQCWQLGSNLLKIDSSNELVSVDFCYDYLWCVS

SEQ ID NO: 1003 - protein, 143 aa, Homo sapiens
MEYHPDLENLDEDGYTQLHFDSQSNTRIAVVSEKGSCAASPPWRLIAVILGILCLVILVIAVVLGTMGVLSSPCPPNWIIYEKSCYLFSMSLNSWDGSKRQCWQLGSNLLKIDSSNELISDQNHSYPRKPISKLCMDSRVSHL

SEQ ID NO: 1004 - protein, 45 aa, Homo sapiens
MEYHPDLENLDEDGYTQLHFDSQSNTRIAVVSEKGIYSKTSVFPT

SEQ ID NO: 1005 - protein, 77 aa, Homo sapiens
MEYHPDLENLDEDGYTQLHFDSQSNTRIAVVSEKGSCAASPPWRLIAVILGILCLVILVIAVVLGTMAGFKAVEFKG

SEQ ID NO: 1006 - protein, 116 aa, Homo sapiens
MEYHPDLENLDEDGYTQLHFDSQSNTRIAVVSEKGSCAASPPWRLIAVILGILCLVILVIAVVLGTMGTGQFLKDLSFLNNRRKLFGDPIQEATHWRMATFYQEIKRTTVNPHNHL

SEQ ID NO: 1007 - protein, 209 aa, Homo sapiens
MMQEQQPQSTEKRGWLSLRLWSVAGISIALLSACFIVSCVVTYHFTYGETGKRLSELHSYHSSLTCFSEGTKVPAWGCCPASWKSFGSSCYFISSEEKVWSKSEQNCVEMGAHLVVFNTEAEQNFIVQQLNESFSYFLGLSDPQGNNNWQWIDKTPYEKNVRFWHLGEPNHSAEQCASIVFWKPTGWGWNDVICETRRNSICEMNKIYL

SEQ ID NO: 1008 - protein, 179 aa, Homo sapiens
MMQEQQPQSTVTYHFTYGETGKRLSELHSYHSSLTCFSEGTKVPAWGCCPASWKSFGSSCYFISSEEKVWSKSEQNCVEMGAHLVVFNTEAEQNFIVQQLNESFSYFLGLSDPQGNNNWQWIDKTPYEKNVRFWHLGEPNHSAEQCASIVFWKPTGWGWNDVICETRRNSICEMNKIYL

SEQ ID NO: 1009 - protein, 316 aa, Homo sapiens
MTRTYENFQYLENKVKVQGFKNGPLPLQSLLQRLCSGPCHLLLSLGLGLLLLVIICVVGFQNSKFQRDLVTLRTDFSNFTSNTVAEIQALTSQGSSLEETIASLKAEVEGFKQERQAGVSELQEHTTQKAHLGHCPHCPSVCVPVHSEMLLRVQQLVQDLKKLTCQVATLNNNASTEGTCCPVNWVEHQDSCYWFSHSGMSWAEAEKYCQLKNAHLVVINSREEQNFVQKYLGSAYTWMGLSDPEGAWKWVDGTDYATGFQNWKPGQPDDWQGHGLGGGEDCAHFHPDGRWNDDVCQRPYHWVCEAGLGQTSQESH

SEQ ID NO: 1010 - protein, 292 aa, Homo sapiens
MTRTYENFQYLENKVKVQGFKNGPLPLQSLLQRLCSGPCHLLLSLGLGLLLLVIICVVGFQNSKFQRDLVTLRTDFSNFTSNTVAEIQALTSQGSSLEETIASLKAEVEGFKQERQAVHSEMLLRVQQLVQDLKKLTCQVATLNNNGEEASTEGTCCPVNWVEHQDSCYWFSHSGMSWAEAEKYCQLKNAHLVVINSREEQNFVQKYLGSAYTWMGLSDPEGAWKWVDGTDYATGFQNWKPGQPDDWQGHGLGGGEDCAHFHPDGRWNDDVCQRPYHWVCEAGLGQTSQESH

SEQ ID NO: 1011 - protein, 256 aa, Homo sapiens
MTRTYENFQYLENKVKVQGFKNGPLPLQSLLQRLCSGPCHLLLSLGLGLLLLVIICVVGFQNSKFQRDLVTLRTDFSNFTSNTVAEIQALTSQGSSLEETIASLKAEVEGFKQERQAVHSEMLLRVQQLVQDLKKLTCQVATLNNNASTEGTCCPVNWVEHQDSCYWFSHSGMSWAEAEKYCQLKNAHLVVINSREEQVRASGTQFLRHVPFREMVLKLGRTLESSGSFQNDCHLCHTLRDLIGLSIQRNISKLLS

SEQ ID NO: 1012 - protein, 1456 aa, Homo sapiens [sequence omitted]

SEQ ID NO: 1013 - protein, 498 aa, Homo sapiens
MRLPLLLVFASVIPGAVLLLDTRQFLIYNEDHKRCVDAVSPSAVQTAACNQDAESQKFRWVSESQIMSVAFKLCLGVPSKTDWVAITLYACDSKSEFQKWECKNDTLLGIKGEDLFFNYGNRQEKNIMLYKGSGLWSRWKIYGTTDNLCSRGYEAMYTLLGNANGATCAFPFKFENKWYADCTSAGRSDGWLWCGTTTDYDTDKLFGYCPLKFEGSESLWNKDPLTSVSYQINSKSALTWHQARKSCQQQNAELLSITEIHEQTYLTGLTSSLTSGLWIGLNSLSFNSGWQWSDRSPFRYLNWLPGSPSAEPGKSCVSLNPGKNAKWENLECVQKLGYICKKGNTTLNSFVIPSESDVPTHCPSQWWPYAGHCYKIHRDEKKIQRDALTTCRKEGGDLTSIHTIEELDFIISQLGYEPNDELWIGLNDIKIQMYFEWSDGTPVTFTKWLRGEPSHENNRQEDCVVMKGKAGVQWHNLGSMQPLPREFKRFSCLSLPSS

SEQ ID NO: 1014 - protein, 374 aa, Homo sapiens
MWFLTTLLLWVPVDGQVDTTKAVITLQPPWVSVFQEETVTLHCEVLHLPGSSSTQWFLNGTATQTSTPSYRITSASVNDSGEYRCQRGLSGRSDPIQLEIHRGWLLLQVSSRVFTEGEPLALRCHAWKDKLVYNVLYYRNGKAFKFFHWNSNLTILKTNISHNGTYHCSGMGKHRYTSAGISVTVKELFPAPVLNASVTSPLLEGNLVTLSCETKLLLQRPGLQLYFSFYMGSKTLRGRNTSSEYQILTARREDSGLYWCEAATEDGNVLKRSPELELQVLGLQLPTPVWFHVLFYLAVGIMFLVNTVLWVTIRKELKRKKKWDLEISLDSGHEKKVISSLQEDRHLEEELKCQEQKEEQLQEGVHRKEPQGAT

SEQ ID NO: 1015 - protein, 344 aa, Homo sapiens
MWFLTTLLLWVPVDGQVDTTKAVITLQPPWVSVFQEETVTLHCEVLHLPGSSSTQWFLNGTATQTSTPSYRITSASVNDSGEYRCQRGLSGRSDPIQLEIHRGWLLLQVSSRVFTEGEPLALRCHAWKDKLVYNVLYYRNGKAFKFFHWNSNLTILKTNISHNGTYHCSGMGKHRYTSAGISVTVKELFPAPVLNASVTSPLLEGNLVTLSCETKLLLQRPGLQLYFSFYMGSKTLRGRNTSSEYQILTARREDSGLYWCEAATEDGNVLKRSPELELQVLGLQLPTPVWFHVLFYLAVGIMFLVNTVLWVTIRKELKRKKKWDLEISLDSGGQALEAPTQGCA

SEQ ID NO: 1016 - protein, 1189 aa, Homo sapiens
MVPCWNHGNITRSKAEELLSRTGKDGSFLVRASESISRAYALCVLYRNCVYTYRILPNEDDKFTVQASEGVSMRFFTKLDQLIEFYKKENMGLVTHLQYPVPLEEEDTGDDPEEDTVESVVSPPELPPRNIPLTASSCEAKEVPFSNENPRATETSRPSLSETLFQRLQSMDTSGLPEEHLKAIQDYLSTQLAQDSEFVKTGSSSLPHLKKLTTLLCKELYGEVIRTLPSLESLQRLFDQQLSPGLRPRPQVPGEANPINMVSKLSQLTSLLSSIEDKVKALLHEGPESPHRPSLIPPVTFEVKAESLGIPQKMQLKVDVESGKLIIKKSKDGSEDKFYSHKKILQLIKSQKFLNKLVILVETEKEKILRKEYVFADSKKREGFCQLLQQMKNKHSEQPEPDMITIFIGTWNMGNAPPPKKITSWFLSKGQGKTRDDSADYIPHDIYVIGTQEDPLSEKEWLEILKHSLQEITSVTFKTVAIHTLWNIRIVVLAKPEHENRISHICTDNVKTGIANTLGNKGAVGVSFMFNGTSLGFVNSHLTSGSEKKLRRNQNYMNILRFLALGDKKLSPFNITHRFTHLFWFGDLNYRVDLPTWEAETIIQKIKQQQYADLLSHDQLLTERREQKVFLHFEEEEITFAPTYRFERLTRDKYAYTKQKATGMKYNLPSWCDRVLWKSYPLVHVVCQSYGSTSDIMTSDHSPVFATFEAGVTSQFVSKNGPGTVDSQGQIEFLRCYATLKTKSQTKFYLEFHSSCLESFVKSQEGENEEGSEGELVVKFGETLPKLKPIISDPEYLLDQHILISIKSSDSDESYGEGCIALRLEATETQLPIYTPLTHHGELTGHFQGEIKLQTSQGKTREKLYDFVKTERDESSGPKTLKSLTSHDPMKQWEVTSRAPPCSGSSITEIINPNYMGVGPFGPPMPLHVKQTLSPDQQPTAWSYDQPPKDSPLGPCRGESPPTPPGQPPISPKKFLPSTANRGLPPRTQESRPSDLGKNAGDTLPQEDLPLTKPEMFENPLYGSLSSFPKPAPRKDQESPKMPRKEPPPCPEPGILSPSIVLTKAQEADRGEGPGKQVPAPRLRSFTCSSSAEGRAAGGDKSQGKPKTPVSSQAPVPAKRPIKPSRSEINQQTPPTPTPRPPLPVKSPAVLHLQHSKGRDYRDNTELPHHGKHRPEEGPPGPLGRTAMQ

SEQ ID NO: 1017 - protein, 1188 aa, Homo sapiens
MVPCWNHGNITRSKAEELLSRTGKDGSFLVRASESISRAYALCVLYRNCVYTYRILPNEDDKFTVQASEGVSMRFFTKLDQLIEFYKKENMGLVTHLQYPVPLEEEDTGDDPEEDTESVVSPPELPPRNIPLTASSCEAKEVPFSNENPRATETSRPSLSETLFQRLQSMDTSGLPEEHLKAIQDYLSTQLAQDSEFVKTGSSSLPHLKKLTTLLCKELYGEVIRTLPSLESLQRLFDQQLSPGLRPRPQVPGEANPINMVSKLSQLTSLLSSIEDKVKALLHEGPESPHRPSLIPPVTFEVKAESLGIPQKMQLKVDVESGKLIIKKSKDGSEDKFYSHKKILQLIKSQKFLNKLVILVETEKEKILRKEYVFADSKKREGFCQLLQQMKNKHSEQPEPDMITIFIGTWNMGNAPPPKKITSWFLSKGQGKTRDDSADYIPHDIYVIGTQEDPLSEKEWLEILKHSLQEITSVTFKTVAIHTLWNIRIVVLAKPEHENRISHICTDNVKTGIANTLGNKGAVGVSFMFNGTSLGFVNSHLTSGSEKKLRRNQNYMNILRFLALGDKKLSPFNITHRFTHLFWFGDLNYRVDLPTWEAETIIQKIKQQQYADLLSHDQLLTERREQKVFLHFEEEEITFAPTYRFERLTRDKYAYTKQKATGMKYNLPSWCDRVLWKSYPLVHVVCQSYGSTSDIMTSDHSPVFATFEAGVTSQFVSKNGPGTVDSQGQIEFLRCYATLKTKSQTKFYLEFHSSCLESFVKSQEGENEEGSEGELVVKFGETLPKLKPIISDPEYLLDQHILISIKSSDSDESYGEGCIALRLEATETQLPIYTPLTHHGELTGHFQGEIKLQTSQGKTREKLYDFVKTERDESSGPKTLKSLTSHDPMKQWEVTSRAPPCSGSSITEIINPNYMGVGPFGPPMPLHVKQTLSPDQQPTAWSYDQPPKDSPLGPCRGESPPTPPGQPPISPKKFLPSTANRGLPPRTQESRPSDLGKNAGDTLPQEDLPLTKPEMFENPLYGSLSSFPKPAPRKDQESPKMPRKEPPPCPEPGILSPSIVLTKAQEADRGEGPGKQVPAPRLRSFTCSSSAEGRAAGGDKSQGKPKTPVSSQAPVPAKRPIKPSRSEINQQTPPTPTPRPPLPVKSPAVLHLQHSKGRDYRDNTELPHHGKHRPEEGPPGPLGRTAMQ

SEQ ID NO: 1018 - protein, 976 aa, Homo sapiens
MFTLSPAPREVIRTLPSLESLQRLFDQQLSPGLRPRPQVPGEANPINMVSKLSQLTSLLSSIEDKVKALLHEGPESPHRPSLIPPVTFEVKAESLGIPQKMQLKVDVESGKLIIKKSKDGSEDKFYSHKKILQLIKSQKFLNKLVILVETEKEKILRKEYVFADSKKREGFCQLLQQMKNKHSEQPEPDMITIFIGTWNMGNAPPPKKITSWFLSKGQGKTRDDSADYIPHDIYVIGTQEDPLSEKEWLEILKHSLQEITSVTFKTVAIHTLWNIRIVVLAKPEHENRISHICTDNVKTGIANTLGNKGAVGVSFMFNGTSLGFVNSHLTSGSEKKLRRNQNYMNILRFLALGDKKLSPFNITHRFTHLFWFGDLNYRVDLPTWEAETIIQKIKQQQYADLLSHDQLLTERREQKVFLHFEEEEITFAPTYRFERLTRDKYAYTKQKATGMKYNLPSWCDRVLWKSYPLVHVVCQSYGSTSDIMTSDHSPVFATFEAGVTSQFVSKNGPGTVDSQGQIEFLRCYATLKTKSQTKFYLEFHSSCLESFVKSQEGENEEGSEGELVVKFGETLPKLKPIISDPEYLLDQHILISIKSSDSDESYGEGCIALRLEATETQLPIYTPLTHHGELTGHFQGEIKLQTSQGKTREKLYDFVKTERDESSGPKTLKSLTSHDPMKQWEVTSRAPPCSGSSITEIINPNYMGVGPFGPPMPLHVKQTLSPDQQPTAWSYDQPPKDSPLGPCRGESPPTPPGQPPISPKKFLPSTANRGLPPRTQESRPSDLGKNAGDTLPQEDLPLTKPEMFENPLYGSLSSFPKPAPRKDQESPKMPRKEPPPCPEPGILSPSIVLTKAQEADRGEGPGKQVPAPRLRSFTCSSSAEGRAAGGDKSQGKPKTPVSSQAPVPAKRPIKPSRSEINQQTPPTPTPRPPLPVKSPAVLHLQHSKGRDYRDNTELPHHGKHRPEEGPPGPLGRTAMQ

SEQ ID NO: 1019 - protein, 254 aa, Homo sapiens
MWQLLLPTALLLLVSAGMRTEDLPKAVVFLEPQWYRVLEKDSVTLKCQGAYSPEDNSTQWFHNESLISSQASSYFIDAATVDDSGEYRCQTNLSTLSDPVQLEVHIGWLLLQAPRWVFKEEDPIHLRCHSWKNTALHKVTYLQNGKGRKYFHHNSDFYIPKATLKDSGSYFCRGLFGSKNVSSETVNITITQGLAVSTISSFFPPGYQVSFCLVMVLLFAVDTGLYFSVKTNIRSSTRDWKDHKFKWRKDPQDK

SEQ ID NO: 1020 - protein, 283 aa, Homo sapiens
MEPPGDWGPPPWRSTPKTDVLRLVLYLTFLGAPCYAPALPSCKEDEYPVGSECCPKCSPGYRVKEACGELTGTVCEPCPPGTYIAHLNGLSKCLQCQMCDPAMGLRASRNCSRTENAVCGCSPGHFCIVQDGDHCAACRAYATSSPGQRVQKGGTESQDTLCQNCPPGTFSPNGTLEECQHQTKCSWLVTKAGAGTSSSHWVWWFLSGSLVIVIVCSTVGLIICVKRRKPRGDVVKVIVSVQRKRQEAEGEATVIEALQAPPDVTTVAVEETIPSFTGRSPNH

SEQ ID NO: 1021 - protein, 199 aa, Homo sapiens
MVSRPPRTPLSPSSWTPAMGLRASRNCSRTENAVCGCSPGHFCIVQDGDHCAACRAYATSSPGQRVQKGGTESQDTLCQNCPPGTFSPNGTLEECQHQTKCSWLVTKAGAGTSSSHWVWWFLSGSLVIVIVCSTVGLIICVKRRKPRGDVVKVIVSVQRKRQEAEGEATVIEALQAPPDVTTVAVEETIPSFTGRSPNH

SEQ ID NO: 1022 - protein, 310 aa, Homo sapiens
MGILSFLPVLATESDWADCKSPQPWGHMLLWTAVLFLAPVAGTPAAPPKAVLKLEPQWINVLQEDSVTLTCRGTHSPESDSIQWFHNGNLIPTHTQPSYRFKANNNDSGEYTCQTGQTSLSDPVHLTVLSEWLVLQTPHLEFQEGETIVLRCHSWKDKPLVKVTFFQNGKSKKFSRSDPNFSIPQANHSHSGDYHCTGNIGYTLYSSKPVTITVQAPSSSPMGIIVAVVTGIAVAAIVAAVVALIYCRKKRISALPGYPECREMGETLPEKPANPTNPDEADKVGAENTITYSLLMHPDALEEPDDQNRI

SEQ ID NO: 1023 - protein, 303 aa, Homo sapiens
MGILSFLPVLATESDWADCKSPQPWGHMLLWTAVLFLAAPPKAVLKLEPQWINVLQEDSVTLTCRGTHSPESDSIQWFHNGNLIPTHTQPSYRFKANNNDSGEYTCQTGQTSLSDPVHLTVLSEWLVLQTPHLEFQEGETIVLRCHSWKDKPLVKVTFFQNGKSKKFSRSDPNFSIPQANHSHSGDYHCTGNIGYTLYSSKPVTITVQAPSSSPMGIIVAVVTGIAVAAIVAAVVALIYCRKKRISALPGYPECREMGETLPEKPANPTNPDEADKVGAENTITYSLLMHPDALEEPDDQNRI

SEQ ID NO: 1024 - protein, 309 aa, Homo sapiens
MGILSFLPVLATESDWADCKSPQPWGHMLLWTAVLFLAPVAGTPAPPKAVLKLEPQWINVLQEDSVTLTCRGTHSPESDSIQWFHNGNLIPTHTQPSYRFKANNNDSGEYTCQTGQTSLSDPVHLTVLSEWLVLQTPHLEFQEGETIVLRCHSWKDKPLVKVTFFQNGKSKKFSRSDPNFSIPQANHSHSGDYHCTGNIGYTLYSSKPVTITVQAPSSSPMGIIVAVVTGIAVAAIVAAVVALIYCRKKRISALPGYPECREMGETLPEKPANPTNPDEADKVGAENTITYSLLMHPDALEEPDDQNRI

SEQ ID NO: 1025 - protein, 290 aa, Homo sapiens
MGILSFLPVLATESDWADCKSPQPWGHMLLWTAVLFLAPVAGTPAPPKAVLKLEPQWINVLQEDSVTLTCRGTHSPESDSIQWFHNGNLIPTHTQPSYRFKANNNDSGEYTCQTGQTSLSDPVHLTVLSEWLVLQTPHLEFQEGETIVLRCHSWKDKPLVKVTFFQNGKSKKFSRSDPNFSIPQANHSHSGDYHCTGNIGYTLYSSKPVTITVQAPSSSPMGIIVAVVTGIAVAAIVAAVVALIYCRKKRISANPTNPDEADKVGAENTITYSLLMHPDALEEPDDQNRI

SEQ ID NO: 1026 - protein, 323 aa, Homo sapiens
MWPLVAALLLGSACCGSAQLLFNKTKSVEFTFCNDTVVIPCFVTNMEAQNTTEVYVKWKFKGRDIYTFDGALNKSTVPTDFSSAKIEVSQLLKGDASLKMDKSDAVSHTGNYTCEVTELTREGETIIELKYRVVSWFSPNENILIVIFPIFAILLFWGQFGIKTLKYRSGGMDEKTIALLVAGLVITVIVIVGAILFVPGEYSLKNATGLGLIVTSTGILILLHYYVFSTAIGLTSFVIAILVIQVIAYILAVVGLSLCIAACIPMHGPLLISGLSILALAQLLGLVYMKFVASNQKTIQPPRKAVEEPLNAFKESKGMMNDE

SEQ ID NO: 1027 - protein, 292 aa, Homo sapiens
MWPLVAALLLGSACCGSAQLLFNKTKSVEFTFCNDTVVIPCFVTNMEAQNTTEVYVKWKFKGRDIYTFDGALNKSTVPTDFSSAKIEVSQLLKGDASLKMDKSDAVSHTGNYTCEVTELTREGETIIELKYRVVSWFSPNENILIVIFPIFAILLFWGQFGIKTLKYRSGGMDEKTIALLVAGLVITVIVIVGAILFVPGEYSLKNATGLGLIVTSTGILILLHYYVFSTAIGLTSFVIAILVIQVIAYILAVVGLSLCIAACIPMHGPLLISGLSILALAQLLGLVYMKFV

SEQ ID NO: 1028 - protein, 305 aa, Homo sapiens
MWPLVAALLLGSACCGSAQLLFNKTKSVEFTFCNDTVVIPCFVTNMEAQNTTEVYVKWKFKGRDIYTFDGALNKSTVPTDFSSAKIEVSQLLKGDASLKMDKSDAVSHTGNYTCEVTELTREGETIIELKYRVVSWFSPNENILIVIFPIFAILLFWGQFGIKTLKYRSGGMDEKTIALLVAGLVITVIVIVGAILFVPGEYSLKNATGLGLIVTSTGILILLHYYVFSTAIGLTSFVIAILVIQVIAYILAVVGLSLCIAACIPMHGPLLISGLSILALAQLLGLVYMKFVASNQKTIQPPRNN

SEQ ID NO: 1029 - protein, 311 aa, Homo sapiens
MWPLVAALLLGSACCGSAQLLFNKTKSVEFTFCNDTVVIPCFVTNMEAQNTTEVYVKWKFKGRDIYTFDGALNKSTVPTDFSSAKIEVSQLLKGDASLKMDKSDAVSHTGNYTCEVTELTREGETIIELKYRVVSWFSPNENILIVIFPIFAILLFWGQFGIKTLKYRSGGMDEKTIALLVAGLVITVIVIVGAILFVPGEYSLKNATGLGLIVTSTGILILLHYYVFSTAIGLTSFVIAILVIQVIAYILAVVGLSLCIAACIPMHGPLLISGLSILALAQLLGLVYMKFVASNQKTIQPPRKAVEEPLN

SEQ ID NO: 1030 - protein, 495 aa, Homo sapiens
MPMGSLQPLATLYLLGMLVASCLGRLSWYDPDFQARLTRSNSKCQGQLEVYLKDGWHMVCSQSWGRSSKQWEDPSQASKVCQRLNCGVPLSLGPFLVTYTPQSSIICYGQLGSFSNCSHSRNDMCHSLGLTCLEPQKTTPPTTRPPPTTTPEPTAPPRLQLVAQSGGQHCAGVVEFYSGSLGGTISYEAQDKTQDLENFLCNNLQCGSFLKHLPETEAGRAQDPGEPREHQPLPIQWKIQNSSCTSLEHCFRKIKPQKSGRVLALLCSGFQPKVQSRLVGGSSICEGTVEVRQGAQWAALCDSSSARSSLRWEEVCREQQCGSVNSYRVLDAGDPTSRGLFCPHQKLSQCHELWERNSYCKKVFVTCQDPNPAGLAAGTVASIILALVLLVVLLVVCGPLAYKKLVKKFRQKKQRQWIGPTGMNQNMSFHRNHTATVRSHAENPTASHVDNEYSQPPRNSHLSAYPALEGALHRSSMQPDNSSDSDYDLHGAQRL

SEQ ID NO: 1031 - protein, 556 aa, Homo sapiens [sequence omitted]

SEQ ID NO: 1032 - protein, 557 aa, Homo sapiens
MPPPRLLFFLLFLTPMEVRPEEPLVVKVEEGDNAVLQCLKGTSDGPTQQLTWSRESPLKPFLKLSLGLPGLGIHMRPLAIWLFIFNVSQQMGGFYLCQPGPPSEKAWQPGWTVNVEGSGELFRWNVSDLGGLGCGLKNRSSEGPSSPSGKLMSPKLYVWAKDRPEIWEGEPPCLPPRDSLNQSLSQDLTMAPGSTLWLSCGVPPDSVSRGPLSWTHVHPKGPKSLLSLELKDDRPARDMWVMETGLLLPRATAQDAGKYYCHRGNLTMSFHLEITARPVLWHWLLRTGGWKVSAVTLAYLIFCLCSLVGILHLQRALVLRRKRKRMTDPTRRFFKVTPPPGSGPQNQYGNVLSLPTPTSGLGRAQRWAAGLGGTAPSYGNPSSDVQADGALGSRSPPGVGPEEEEGEGYEEPDSEEDSEFYENDSNLGQDQLSQDGSGYENPEDEPLGPEDEDSFSNAESYENEDEELTQPVARTMDFLSPHGSAWDPSREATSLAGSQSYEDMRGILYAAPQLRSIRGQPGPNHEEDADSYENMDNPDGPDPAWGGGGRMGTWSTR

SEQ ID NO: 1033 - protein, 297 aa, Homo sapiens
MTTPRNSVNGTFPAEPMKGPIAMQSGPKPLFRRMSSLVGPTQSFFMRESKTLGAVQIMNGLFHIALGGLLMIPAGIYAPICVTVWYPLWGGIMYIISGSLLAATEKNSRKCLVKGKMIMNSLSLFAAISGMILSIMDILNIKISHFLKMESLNFIRAHTPYINIYNCEPANPSEKNSPSTQYCYSIQSLFLGILSVMLIFAFFQELVIAGIVENEWKRTCSRPKSNIVLLSAEEKKEQTIEIKEEVVGLTETSSQPKNEEDIEIIPIQEEEEEETETNFPEPPQDQESSPIENDSSP

SEQ ID NO: 1034 - protein, 130 aa, Homo sapiens
MTTPRNSVNGTFPAEPMKGPIAMQSGPKPLFRRMSSLELVIAGIVENEWKRTCSRPKSNIVLLSAEEKKEQTIEIKEEVVGLTETSSQPKNEEDIEIIPIQEEEEEETETNFPEPPQDQESSPIENDSSP

SEQ ID NO: 1035 - protein, 272 aa, Homo sapiens
MDSYLLMWGLLTFIMVPGCQAELCDDDPPEIPHATFKAMAYKEGTMLNCECKRGFRRIKSGSLYMLCTGNSSHSSWDNQCQCTSSATRNTTKQVTPQPEEQKERKTTEMQSPMQPVDQASLPGHCREPPPWENEATERIYHFVVGQMVYYQCVQGYRALHRGPAESVCKMTHGKTRWTQPQLICTGEMETSQFPGEEKPQASPEGRPESETSCLVTTTDFQIQTEMAATMETSIFTTEYQVAVAGCVFLLISVLLLSGLTWQRRQRKSRRTI

SEQ ID NO: 1036 - protein, 281 aa, Homo sapiens
MSAQESCLSLIKYFLFVFNLFFFVLGSLIFCFGIWILIDKTSFVSFVGLAFVPLQIWSKVLAISGIFTMGIALLGCVGALKELRCLLGLYFGMLLLLFATQITLGILISTQRAQLERSLRDVVEKTIQKYGTNPEETAAEESWDYVQFQLRCCGWHYPQDWFQVLILRGNGSEAHRVPCSCYNLSATNDSTILDKVILPQLSRLGHLARSRHSADICAVPAESHIYREGCAQGLQKWLHNNLISIVGICLGVGLLELGFMTLSIFLCRNLDHVYNRLARYR

SEQ ID NO: 1037 - protein, 213 aa, Homo sapiens
MGIALLGCVGALKELRCLLGLYFGMLLLLFATQITLGILISTQRAQLERSLRDVVEKTIQKYGTNPEETAAEESWDYVQFQLRCCGWHYPQDWFQVLILRGNGSEAHRVPCSCYNLSATNDSTILDKVILPQLSRLGHLARSRHSADICAVPAESHIYREGCAQGLQKWLHNNLISIVGICLGVGLLELGFMTLSIFLCRNLDHVYNRLARYR

SEQ ID NO: 1038 - protein, 202 aa, Homo sapiens
MGIALLGCVGALKELRCLLGLYFGMLLLLFATQITLGILISTQRAQLERSLRDVVEKTIQKYGTNPEETAAEESWDYVQFQLRCCGWHYPQDWFQVLILRGNGSEAHRVPCSCYNLSATNDSTILDKVILPQLSRLGHLARSRHSADICAVPAESHIYREGCAQGLQKWLHNNLISIVGICLGVGLLEVIWPRPHPRSALNP

SEQ ID NO: 1039 - protein, 595 aa, Homo sapiens
MRVLLAALGLLFLGALRAFPQDRPFEDTCHGNPSHYYDKAVRRCCYRCPMGLFPTQQCPQRPTDCRKQCEPDYYLDEADRCTACVTCSRDDLVEKTPCAWNSSRVCECRPGMFCSTSAVNSCARCFFHSVCPAGMIVKFPGTAQKNTVCEPASPGVSPACASPENCKEPSSGTIPQAKPTPVSPATSSASTMPVRGGTRLAQEAASKLTRAPDSPSSVGRPSSDPGLSPTQPCPEGSGDCRKQCEPDYYLDEAGRCTACVSCSRDDLVEKTPCAWNSSRTCECRPGMICATSATNSCARCVPYPICAAETVTKPQDMAEKDTTFEAPPLGTQPDCNPTPENGEAPASTSPTQSLLVDSQASKTLPIPTSAPVALSSTGKPVLDAGPVLFWVILVLVVVVGSSAFLLCHRRACRKRIRQKLHLCYPVQTSQPKLELVDSRPRRSSTQLRSGASVTEPVAEERGLMSQPLMETCHSVGAAYLESLPLQDASPAGGPSSPRDLPEPRVSTEHTNNKIEKIYIMKADTVIVGTVKAELPEGRGLAGPAEPELEEELEADHTPHYPEQETEPPLGSCSDVMLSVEEEGKEDPLPTAASGK

SEQ ID NO: 1040 - protein, 132 aa, Homo sapiens
MSQPLMETCHSVGAAYLESLPLQDASPAGGPSSPRDLPEPRVSTEHTNNKIEKIYIMKADTVIVGTVKAELPEGRGLAGPAEPELEEELEADHTPHYPEQETEPPLGSCSDVMLSVEEEGKEDPLPTAASGK

SEQ ID NO: 1041 - protein, 483 aa, Homo sapiens
MFCSTSAVNSCARCFFHSVCPAGMIVKFPGTAQKNTVCEPASPGVSPACASPENCKEPSSGTIPQAKPTPVSPATSSASTMPVRGGTRLAQEAASKLTRAPDSPSSVGRPSSDPGLSPTQPCPEGSGDCRKQCEPDYYLDEAGRCTACVSCSRDDLVEKTPCAWNSSRTCECRPGMICATSATNSCARCVPYPICAAETVTKPQDMAEKDTTFEAPPLGTQPDCNPTPENGEAPASTSPTQSLLVDSQASKTLPIPTSAPVALSSTGKPVLDAGPVLFWVILVLVVVVGSSAFLLCHRRACRKRIRQKLHLCYPVQTSQPKLELVDSRPRRSSTLRSGASVTEPVAEERGLMSQPLMETCHSVGAAYLESLPLQDASPAGGPSSPRDLPEPRVSTEHTNNKIEKIYIMKADTVIVGTVKAELPEGRGLAGPAEPELEEELEADHTPHYPEQETEPPLGSCSDVMLSVEEEGKEDPLPTAASGK

SEQ ID NO: 1042 - protein, 364 aa, Homo sapiens
MPLLLLLPLLWAGALAMDPNFWLQVQESVTVQEGLCVLVPCTFFHPIPYYDKNSPVHGYWFREGAIISRDSPVATNKLDQEVQEETQGRFRLLGDPSRNNCSLSIVDARRRDNGSYFFRMERGSTKYSYKSPQLSVHVTDLTHRPKILIPGTLEPGHSKNLTCSVSWACEQGTPPIFSWLSAAPTSLGPRTTHSSVLIITPRPQDHGTNLTCQVKFAGAGVTTERTIQLNVTYVPQNPTTGIFPGDGSGKQETRAGVVHGAIGGAGVTALLALCLCLIFFIVKTHRRKAARTAVGRNDTHPTTGSASPKHQKKSKLHGPTETSSCSGAAPTVEMDEELHYASLNFHGMNPSKDTSTEYSEVRTQ

SEQ ID NO: 1043 - protein, 310 aa, Homo sapiens
MPLLLLLPLLWAGALAMDPNFWLQVQESVTVQEGLCVLVPCTFFHPIPYYDKNSPVHGYWFREGAIISRDSPVATNKLDQEVQEETQGRFRLLGDPSRNNCSLSIVDARRRDNGSYFFRMERGSTKYSYKSPQLSVHVTDLTHRPKILIPGTLEPGHSKNLTCSVSWACEQGTPPIFSWLSAAPTSLGPRTTHSSVLIITPRPQDHGTNLTCQVKFAGAGVTTERTIQLNVTYVPQNPTTGIFPGDGSGKQETRAGVVHGAIGGAGVTALLALCLCLIFFIVKTHRRKAARTAVGRNDTHPTTGSASPVR

SEQ ID NO: 1044 - protein, 237 aa, Homo sapiens
MPLLLLLPLLWADLTHRPKILIPGTLEPGHSKNLTCSVSWACEQGTPPIFSWLSAAPTSLGPRTTHSSVLIITPRPQDHGTNLTCQVKFAGAGVTTERTIQLNVTYVPQNPTTGIFPGDGSGKQETRAGVVHGAIGGAGVTALLALCLCLIFFIVKTHRRKAARTAVGRNDTHPTTGSASPKHQKKSKLHGPTETSSCSGAAPTVEMDEELHYASLNFHGMNPSKDTSTEYSEVRTQ

SEQ ID NO: 1045 - protein, 1304 aa, Homo sapiens
MYLWLKLLAFGFAFLDTEVFVTGQSPTPSPTGLTTAKMPSVPLSSDPLPTHTTAFSPASTFERENDFSETTTSLSPDNTSTQVSPDSLDNASAFNTTGVSSVQTPHLPTHADSQTPSAGTDTQTFSGSAANAKLNPTPGSNAISDVPGERSTASTFPTDPVSPLTTTLSLAHHSSAALPARTSNTTITANTSDAYLNASETTTLSPSGSAVISTTTIATTPSKPTCDEKYANITVDYLYNKETKLFTAKLNVNENVECGNNTCTNNEVHNLTECKNASVSISHNSCTAPDKTLILDVPPGVEKFQLHDCTQVEKADTTICLKWKNIETFTCDTQNITYRFQCGNMIFDNKEIKLENLEPEHEYKCDSEILYNNHKFTNASKIIKTDFGSPGEPQIIFCRSEAAHQGVITWNPPQRSFHNFTLCYIKETEKDCLNLDKNLIKYDLQNLKPYTKYVLSLHAYIIAKVQRNGSAAMCHFTTKSAPPSQVWNMTVSMTSDNSMHVKCRPPRDRNGPHERYHLEVEAGNTLVRNESHKNCDFRVKDLQYSTDYTFKAYFHNGDYPGEPFILHHSTSYNSKALIAFLAFLIIVTSIALLVVLYKIYDLHKKRSCNLDEQQELVERDDEKQLMNVEPIHADILLETYKRKIADEGRLFLAEFQSIPRVFSKFPIKEARKPFNQNKNRYVDILPYDYNRVELSEINGDAGSNYINASYIDGFKEPRKYIAAQGPRDETVDDFWRMIWEQKATVIVMVTRCEEGNRNKCAEYWPSMEEGTRAFGDVVVKINQHKRCPDYIIQKLNIVNKKEKATGREVTHIQFTSWPDHGVPEDPHLLLKLRRRVNAFSNFFSGPIVVHCSAGVGRTGTYIGIDAMLEGLEAENKVDVYGYVVKLRRQRCLMVQVEAQYILIHQALVEYNQFGETEVNLSELHPYLHNMKKRDPPSEPSPLEAEFQRLPSYRSWRTQHIGNQEENKSKNRNSNVIPYDYNRVPLKHELEMSKESEHDSDESSDDDSDSEEPSKYINASFIMSYWKPEVMIAAQGPLKETIGDFWQMIFQRKVKVIVMLTELKHGDQEICAQYWGEGKQTYGDIEVDLKDTDKSSTYTLRVFELRHSKRKDSRTVYQYQYTNWSVEQLPAEPKELISMIQVVKQKLPQKNSSEGNKHHKSTPLLIHCRDGSQQTGIFCALLNLLESAETEEVVDIFQVVKALRKARPGMVSTFEQYQFLYDVIASTYPAQNGQVKKNNHQEDKIEFDNEVDKVKQDANCVNPLGAPEKLPEAKEQAEGSEPTSGTEGPEHSVNGPASPALNQGS

SEQ ID NO: 1046 - protein, 1143 aa, Homo sapiens
MYLWLKLLAFGFAFLDTEVFVTGQSPTPSPTDAYLNASETTTLSPSGSAVISTTTIATTPSKPTCDEKYANITVDYLYNKETKLFTAKLNVNENVECGNNTCTNNEVHNLTECKNASVSISHNSCTAPDKTLILDVPPGVEKFQLHDCTQVEKADTTICLKWKNIETFTCDTQNITYRFQCGNMIFDNKEIKLENLEPEHEYKCDSEILYNNHKFTNASKIIKTDFGSPGEPQIIFCRSEAAHQGVITWNPPQRSFHNFTLCYIKETEKDCLNLDKNLIKYDLQNLKPYTKYVLSLHAYIIAKVQRNGSAAMCHFTTKSAPPSQVWNMTVSMTSDNSMHVKCRPPRDRNGPHERYHLEVEAGNTLVRNESHKNCDFRVKDLQYSTDYTFKAYFHNGDYPGEPFILHHSTSYNSKALIAFLAFLIIVTSIALLVVLYKIYDLHKKRSCNLDEQQELVERDDEKQLMNVEPIHADILLETYKRKIADEGRLFLAEFQSIPRVFSKFPIKEARKPFNQNKNRYVDILPYDYNRVELSEINGDAGSNYINASYIDGFKEPRKYIAAQGPRDETVDDFWRMIWEQKATVIVMVTRCEEGNRNKCAEYWPSMEEGTRAFGDVVVKINQHKRCPDYIIQKLNIVNKKEKATGREVTHIQFTSWPDHGVPEDPHLLLKLRRRVNAFSNFFSGPIVVHCSAGVGRTGTYIGIDAMLEGLEAENKVDVYGYVVKLRRQRCLMVQVEAQYILIHQALVEYNQFGETEVNLSELHPYLHNMKKRDPPSEPSPLEAEFQRLPSYRSWRTQHIGNQEENKSKNRNSNVIPYDYNRVPLKHELEMSKESEHDSDESSDDDSDSEEPSKYINASFIMSYWKPEVMIAAQGPLKETIGDFWQMIFQRKVKVIVMLTELKHGDQEICAQYWGEGKQTYGDIEVDLKDTDKSSTYTLRVFELRHSKRKDSRTVYQYQYTNWSVEQLPAEPKELISMIQVVKQKLPQKNSSEGNKHHKSTPLLIHCRDGSQQTGIFCALLNLLESAETEEVVDIFQVVKALRKARPGMVSTFEQYQFLYDVIASTYPAQNGQVKKNNHQEDKIEFDNEVDKVKQDANCVNPLGAPEKLPEAKEQAEGSEPTSGTEGPEHSVNGPASPALNQGS

SEQ ID NO: 1047 - protein, 61 aa, Homo sapiens
MKRFLFLLLTISLLVMVQIQTGLSGQNDTSQTSSPSASSNISGGIFLFFVANAIIHLFCFS

SEQ ID NO: 1048 - protein, 184 aa, Homo sapiens
MLQMAGQCSQNEYFDSLLHACIPCQLRCSSNTPPLTCQRYCNASVTNSVKGTNAILWTCLGLSLIISLAVFVLMFLLRKINSEPLKDEFKNTGSGLLGMANIDLEKSRTGDEIILPRGLEYTVEECTCEDCIKSKPKVDSDHCFPLPAMEEGATILVTTKTNDYCKSLPAALSATEIEKSISAR

SEQ ID NO: 1049 - protein, 135 aa, Homo sapiens
MLQMAGQCSQNEYFDSLLHACIPCQLRCSSNTPPLTCQRYCNARSGLLGMANIDLEKSRTGDEIILPRGLEYTVEECTCEDCIKSKPKVDSDHCFPLPAMEEGATILVTTKTNDYCKSLPAALSATEIEKSISAR

SEQ ID NO: 1050 - protein, 1259 aa, Homo sapiens
MDRPLSSSAEAEEELEWQVASRRRKAWAKCRSSWQASETEDLSTEATTQDEEEDEEEDLPGAQLPAAGGRGNVPNEKIAIWLKDCRTPLGASLDEQSSSTLKGVLVRNGGSFEDDLSLGAEANHLHESDAQIENCNNILAKERRLQFHQKGRSMNSTGSGKSSGTVSSVSELLELYEEDPEEILYNLGFGRDEPDIASKIPSRFFNSSSFAKGIDIKVFLSAQMQRMEVENPNYALTSRFRQIEVLTTVANAFSSLYSQVSGTPLQRIGSMSSVTSNKETDPPPPLTRSNTANRLMKTLSKLNLCVDKTEKGESSSPSPSAEKGKILNVSVIEESGNKNDQKSQKIMKKKESSSMLATVKEEVSGSSAAVTENADSDRISDEANSNFNQGTENEQSKETQSHESKLGEESGIVESKLDSDFNISSHSELENSSELKSVHISTPEKEPCAPLTIPSIRNIMTQQKDSFEMEEVQSTEGEAPHVPATYQLGLTKSKRDHLLRTASQHSDSSGFAEDSTDCLSLNHLQVQESLQAMGSSADSCDSETTVTSLGEDLATPTAQDQPYFNESEEESLVPLQKGLEKAAAVADKRKSGSQDFPQCNTIENTGTKQSTCSPGDHIIEITEVEEDLFPAETVELLREASAESDVGKSSESEFTQYTTHHILKSLASIEAKCSDMSSENTTGPPSSMDRVNTALQRAQMKVCSLSNQRMGRSLLKSKDLLKQRYLFAKAGYPLRRSQSLPTTLLSPVRVVSSVNVRLSPGKETRCSPPSFTYKYTPEEEQELEKRVMEHDGQSLVKSTIFISPSSVKKEEAPQSEAPRVEECHHGRTPTCSRLAPPPMSQSTCSLHSIHSEWQERPLCEHTRTLSTHSVPNISGATCSAFASPFGCPYSHRHATYPYRVCSVNPPSAIEMQLRRVLHDIRNSLQNLSQYPMMRGPDPAAAPYSTQKSSVLPLYENTFQELQVMRRSLNLFRTQMMDLELAMLRQQTMVYHHMTEEERFEVDQLQGLRNSVRMELQDLELQLEERLLGLEEQLRAVRMPSPFRSSALMGMCGSRSADNLSCPSPLNVMEPVTELMQEQSYLKSELGLGLGEMGFEIPPGESSESVFSQATSESSSVCSGPSHANRRTGVPSTASVGKSKTPLVARKKVFRASVALTPTAPSRTGSVQTPPDLESSEEVDAAEGAPEVVGPKSEVEEGHGKLPSMPAAEEMHKNVEQDELQQVIREIKESIVGEIRREIVSGLLAAVSSSKASNSKQDYH

SEQ ID NO: 1051 - protein, 1106 aa, Homo sapiens
MNSTGSGKSSGTVSSVSELLELYEEDPEEILYNLGFGRDEPDIASKIPSRFFNSSSFAKGIDIKVFLSAQMQRMEVENPNYALTSRFRQIEVLTTVANAFSSLYSQVSGTPLQRIGSMSSVTSNKETDPPPPLTRSNTANRLMKTLSKLNLCVDKTEKGESSSPSPSAEKGKILNVSVIEESGNKNDQKSQKIMKKKESSSMLATVKEEVSGSSAAVTENADSDRISDEANSNFNQGTENEQSKETQSHESKLGEESGIVESKLDSDFNISSHSELENSSELKSVHISTPEKEPCAPLTIPSIRNIMTQQKDSFEMEEVQSTEGEAPHVPATYQLGLTKSKRDHLLRTASQHSDSSGFAEDSTDCLSLNHLQVQESLQAMGSSADSCDSETTVTSLGEDLATPTAQDQPYFNESEEESLVPLQKGLEKAAAVADKRKSGSQDFPQCNTIENTGTKQSTCSPGDHIIEITEVEEDLFPAETVELLREASAESDVGKSSESEFTQYTTHHILKSLASIEAKCSDMSSENTTGPPSSMDRVNTALQRAQMKVCSLSNQRMGRSLLKSKDLLKQRYLFAKAGYPLRRSQSLPTTLLSPVRVVSSVNVRLSPGKETRCSPPSFTYKYTPEEEQELEKRVMEHDGQSLVKSTIFISPSSVKKEEAPQSEAPRVEECHHGRTPTCSRLAPPPMSQSTCSLHSIHSEWQERPLCEHTRTLSTHSVPNISGATCSAFASPFGCPYSHRHATYPYRVCSVNPPSAIEMQLRRVLHDIRNSLQNLSQYPMMRGPDPAAAPYSTQKSSVLPLYENTFQELQVMRRSLNLFRTQMMDLELAMLRQQTMVYHHMTEEERFEVDQLQGLRNSVRMELQDLELQLEERLLGLEEQLRAVRMPSPFRSSALMGMCGSRSADNLSCPSPLNVMEPVTELMQEQSYLKSELGLGLGEMGFEIPPGESSESVFSQATSESSSVCSGPSHANRRTGVPSTASVGKSKTPLVARKKVFRASVALTPTAPSRTGSVQTPPDLESSEEVDAAEGAPEVVGPKSEVEEGHGKLPSMPAAEEMHKNVEQDELQQVIREIKESIVGEIRREIVSGLLAAVSSSKASNSKQDYH

SEQ ID NO: 1052 - protein, 1256 aa, Homo sapiens
MDRPLSSSAEAEEELEWQVASRRRKAWAKCRSSWQASETEDLSTEATTQDEEEDEEEDLPGAQLPAAGGRGNVPNEKIAIWLKDCRTPLGASLDEQSSSTLKGVLVRNGGSFEDDLSLGAEANHLHESDAQIENCNNILAKERRLQFHQKGRSMNSTGSGKSSGTVSSVSELLELYEEDPEEILYNLGFGRDEPDIASKIPSRFFNSSSFAKGIDIKVFLSAQMQRMEVENPNYALTSRFRQIEVLTTVANAFSSLYSQVSGTPLQRIGSMSSVTSNKETDPPPPLTRSNTANRLMKTLSKLNLCVDKTEKGESSSPSPSAEKGKILNVSVIEESGNKNDQKSQKIMKKKESSSMLATVKEEVSGSSAAVTENADSDRISDEANSNFNQGTENEQSKETQSHESKLGEESGIVESKLDSDFNISSHSELENSSELKSVHISTPEKEPCAPLTIPSIRNIMTQQKDSFEMEEVQSTEGEAPHVPATYQLGLTKSKRDHLLRTASQHSDSSGFAEDSTDCLSLNHLQVQESLQAMGSSADSCDSETTVTSLGEDLATPTAQDQPYFNESEEESLVPLQKGLEKAAAVADKRKSGSQDFPQCNTIENTGTKQSTCSPGDHIIEITEVEEDLFPAETVELLREASAESDVGKSSESEFTQYTTHHILKSLASIEAKCSDMSSENTTGPPSSMDRVNTALQRAQMKVCSLSNQRMGRSLLKSKDLLKQRYLFAKAGYPLRRSQSLPTTLLSPVRVVSSVNVRLSPGKETRCSPPSFTYKYTPEEEQELEKRVMEHDGQSLVKSTIFISPSSVKKEEAPQSEAPRVEECHHGRTPTCSRLAPPPMSQSTCSLHSIHSEWQERPLCEHTRTLSTHSVPNISGATCSAFASPFGCPYSHRHATYPYRVCSVNPPSAIEMQLRRVLHDIRNSLQNLSQYPMMRGPDPAAAPYSTQKSSVLPLYENTFQELQVMRRSLNLFRTQMMDLELAMLRQQTMVYHHMTEEERFEVDQLQGLRNSVRMELQDLELQLEERLLGLEEQLRAVRMPSPFRSSALMGMCGSRSADNLSCPSPLNVMEPVTELMQEQSYLKSELGLGLGEMGFEIPPGESSESVFSQATSESSSVCSGPSHANRRTGVPSTASVGKSKTPLVARKKVFRASVALTPTAPSRTGSVQTPPDLESSEEVDAAEGAPEVVGPKSEVEEGHGKLPSMPAAEEMHKNVEQDELQQVIREVGMDPISCVILELSMICTGGGVICALEDTCC

SEQ ID NO: 1053 - protein, 534 aa, Homo sapiens
MLRRRGSPGMGVHVGAALGALWFCLTGALEVQVPEDPVVALVGTDATLCCSFSPEPGFSLAQLNLIWQLTDTKQLVHSFAEGQDQGSAYANRTALFPDLLAQGNASLRLQRVRVADEGSFTCFVSIRDFGSAAVSLQVAAPYSKPSMTLEPNKDLRPGDTVTITCSSYQGYPEAEVFWQDGQGVPLTGNVTTSQMANEQGLFDVHSILRVVLGANGTYSCLVRNPVLQQDAHSSVTITPQRSPTGAVEVQVPEDPVVALVGTDATLRCSFSPEPGFSLAQLNLIWQLTDTKQLVHSFTEGRDQGSAYANRTALFPDLLAQGNASLRLQRVRVADEGSFTCFVSIRDFGSAAVSLQVAAPYSKPSMTLEPNKDLRPGDTVTITCSSYRGYPEAEVFWQDGQGVPLTGNVTTSQMANEQGLFDVHSVLRVVLGANGTYSCLVRNPVLQQDAHGSVTITGQPMTFPPEALWVTVGLSVCLIALLVALAFVCWRKIKQSCEEENAGAEDQDGEGEGSKTALQPLKHSDSKEDDGQEIA

SEQ ID NO: 1054 - protein, 316 aa, Homo sapiens
MLRRRGSPGMGVHVGAALGALWFCLTGALEVQVPEDPVVALVGTDATLCCSFSPEPGFSLAQLNLIWQLTDTKQLVHSFAEGQDQGSAYANRTALFPDLLAQGNASLRLQRVRVADEGSFTCFVSIRDFGSAAVSLQVAAPYSKPSMTLEPNKDLRPGDTVTITCSSYRGYPEAEVFWQDGQGVPLTGNVTTSQMANEQGLFDVHSVLRVVLGANGTYSCLVRNPVLQQDAHGSVTITGQPMTFPPEALWVTVGLSVCLIALLVALAFVCWRKIKQSCEEENAGAEDQDGEGEGSKTALQPLKHSDSKEDDGQEIA

SEQ ID NO: 1055 - protein, 493 aa, Homo sapiens
MLRRRGSPGMGVHVGAALGALWFCLTGALEVQVPEDPVVALVGTDATLCCSFSPEPGFSLAQLNLIWQLTDTKQLVHSFAEGQDQGSAYANRTALFPDLLAQGNASLRLQRVRVADEGSFTCFVSIRDFGSAAVSLQVAAPYSKPSMTLEPNKDLRPGDTVTITCSSYQGYPEAEVFWQDGQGVPLTGNVTTSQMANEQGLFDVHSILRVVLGANGTYSCLVRNPVLQQDAHSSVTITPQRSPTGAVEVQVPEDPVVALVGTDATLRCSFSPEPGFSLAQLNLIWQLTDTKQLVHSFTEGRDQGSAYANRTALFPDLLAQGNASLRLQRVRVADEGSFTCFVSIRDFGSAAVSLQVAAPYSKPSMTLEPNKDLRPGDTVTITCSSYRGYPEAEVFWQDGQGVPLTGNVTTSQMANEQGLFDVHSVLRVVLGANGTYSCLVRNPVLQQDAHGSVTITGQPMTFPPGPASSAVPLSPAHPPHGSMCWSHWFSRGL

SEQ ID NO: 1056 - protein, 533 aa, Homo sapiens
MLRRRGSPGMGVHVGAALGALWFCLTGALEVQVPEDPVVALVGTDATLCCSFSPEPGFSLAQLNLIWQLTDTKQLVHSFAEGQDQGSAYANRTALFPDLLAQGNASLRLQRVRVADEGSFTCFVSIRDFGSAAVSLQVAAPYSKPSMTLEPNKDLRPGDTVTITCSSYQGYPEAEVFWQDGQGVPLTGNVTTSQMANEQGLFDVHSILRVVLGANGTYSCLVRNPVLQQDAHSSVTITPQRSPTGAVEVQVPEDPVVALVGTDATLRCSFSPEPGFSLAQLNLIWQLTDTKQLVHSFTEGRDQGSAYANRTALFPDLLAQGNASLRLQRVRVADEGSFTCFVSIRDFGSAAVSLQVAAPYSKPSMTLEPNKDLRPGDTVTITCSSYRGYPEAEVFWQDGQGVPLTGNVTTSQMANEQGLFDVHSVLRVVLGANGTYSCLVRNPVLQQDAHGSVTITGQPMTFPPEALWVTVGLSVCLIALLVALAFVCWRKIKQSCEEENAGAEDQDGEGEGSKTALQPLKHSDSKEGKDTWA

SEQ ID NO: 1057 - protein, 273 aa, Homo sapiens; identical to SEQ ID NO: 952

SEQ ID NO: 1058 - protein, 183 aa, Homo sapiens; identical to SEQ ID NO: 953

SEQ ID NO: 1059 - protein, 182 aa, Homo sapiens; identical to SEQ ID NO: 954

SEQ ID NO: 1060 - protein, 296 aa, Homo sapiens
MHRRRSRSCREDQKPVMDDQRDLISNNEQLPMLGRRPGAPESKCSRGALYTGFSILVTLLLAGQATTAYFLYQQQGRLDKLTVTSQNLQLENLRMKLPKPPKPVSKMRMATPLLMQALPMGALPQGPMQNATKYGNMTEDHVMHLLQNADPLKVYPPLKGSFPENLRHLKNTMETIDWKVFESWMHHWLLFEMSRHSLEQKPTDAPPKVLTKCQEEVSHIPAVHPGSFRPKCDENGNYLPLQCYGSIGYCWCVFPNGTEVPNTRSRGHHNCSESLELEDPSSGLGVTKQDLGPVPM

SEQ ID NO: 1061 - protein, 232 aa, Homo sapiens
MHRRRSRSCREDQKPVMDDQRDLISNNEQLPMLGRRPGAPESKCSRGALYTGFSILVTLLLAGQATTAYFLYQQQGRLDKLTVTSQNLQLENLRMKLPKPPKPVSKMRMATPLLMQALPMGALPQGPMQNATKYGNMTEDHVMHLLQNADPLKVYPPLKGSFPENLRHLKNTMETIDWKVFESWMHHWLLFEMSRHSLEQKPTDAPPKESLELEDPSSGLGVTKQDLGPVPM

SEQ ID NO: 1062 - protein, 160 aa, Homo sapiens
MHRRRSRSCREDQKPVMDDQRDLISNNEQLPMLGRRPGAPESKCSRGALYTGFSILVTLLLAGQATTAYFLYQQQGRLDKLTVTSQNLQLENLRMKLPKPPKPVSKMRMATPLLMQALPMGALPQGPMQNATKYGNMTEDHVMHLLQSHWNWRTRLLGWV

SEQ ID NO: 1063 - protein, 334 aa, Homo sapiens
MLALAKILLISTLFYSLLSGSHGKENQDINTTQNIAEVFKTMENKPISLESEANLNSDKENITTSNLKASHSPPLNLPNNSHGITDFSSNSSAEHSLGSLKPTSTISTSPPLIHSFVSKVPWNAPIADEDLLPISAHPNATPALSSENFTWSLVNDTVKTPDNSSITVSILSSEPTSPSVTPLIVEPSGWLTTNSDSFTGFTPYQEKTTLQPTLKFTNNSKLFPNTSDPQKENRNTGIVFGAILGAILGVSLLTLVGYLLCGKRKTDSFSHRRLYDDRNEPVLRLDNAPEPYDVSFGNSSYYNPTLNDSAMPESEENARDGIPMDDIPPLRTSV

SEQ ID NO: 1064 - protein, 284 aa, Homo sapiens
MLALAKILLISTLFYSLLSGSHGKENQDINTTQNIAEVFKTMENKPISLESEANLNSDKENITTSNLKASHSPPLNLPNNSHGITDFSSNSSAEHSLGSLKPTSTISTSPPLIHSFVSKVPWNAPIADEDLLPISAHPNATPALSSENFTWSLVNDTVKTPDNSSITVSILSSEPTSPSVTPLIVEPSGWLTTNSDSFTGFTPYQEKTTLQPTLKFTNNSKLFPNTSDPQKVLRLDNAPEPYDVSFGNSSYYNPTLNDSAMPESEENARDGIPMDDIPPLRTSV

SEQ ID NO: 1065 - protein, 257 aa, Homo sapiens
MAQRMTTQLLLLLVWVAVVGEAQTRIAWARTELLNVCMNAKHHKEKPGPEDKLHEQCRPWRKNACCSTNTSQEAHKDVSYLYRFNWNHCGEMAPACKRHFIQDTCLYECSPNLGPWIQQVDQSWRKERVLNVPLCKEDCEQWWEDCRTSYTCKSNWHKGWNWTSGFNKCAVGAACQPFHFYFPTPTVLCNEIWTHSYKVSNYSRGSGRCIQMWFDPAQGNPNEEVARFYAAAMSGAGPWAAWPFLLSLALMLLWLLS

SEQ ID NO: 1066 - protein, 319 aa, Homo sapiens
MVGKMWPVLWTLCAVRVTVDAISVETPQDVLRASQGKSVTLPCTYHTSTSSREGLIQWDKLLLTHTERVVIWPFSNKNYIHGELYKNRVSISNNAEQSDASITIDQLTMADNGTYECSVSLMSDLEGNTKSRVRLLVLVPPSKPECGIEGETIIGNNIQLTCQSKEGSPTPQYSWKRYNILNQEQPLAQPASGQPVSLKNISTDTSGYYICTSSNEEGTQFCNITVAVRSPSMNVALYVGIAVGVVAALIIIGIIIYCCCCRGKDDNTEDKEDARPNREAYEEPPEQLRELSREREEEDDYRQEEQRSTGRESPDHLDQ

SEQ ID NO: 1067 - protein, 459 aa, Homo sapiens
MAPLCPSPWLPLLIPAPAPGLTVQLLLSLLLLVPVHPQRLPRMQEDSPLGGGSSGEDDPLGEEDLPSEEDSPREEDPPGEEDLPGEEDLPGEEDLPEVKPKSEEEGSLKLEDLPTVEAPGDPQEPQNNAHRDKEGDDQSHWRYGGDPPWPRVSPACAGRFQSPVDIRPQLAAFCPALRPLELLGFQLPPLPELRLRNNGHSVQLTLPPGLEMALGPGREYRALQLHLHWGAAGRPGSEHTVEGHRFPAEIHVVHLSTAFARVDEALGRPGGLAVLAAFLEEGPEENSAYEQLLSRLEEIAEEGSETQVPGLDISALLPSDFSRYFQYEGSLTTPPCAQGVIWTVFNQTVMLSAKQLHTLSDTLWGPGDSRLQLNFRATQPLNGRVIEASFPAGVDSSPRAAEPVQLNSCLAAGDILALVFGLLFAVTSVAFLVQMRRQHRRGTKGGVSYRPAEVAETGA

SEQ ID NO: 1068 - protein, 175 aa, Homo sapiens
MSSQIRQNYSTDVEAAVNSLVNLYLQASYTYLSLGFYFDRDDVALEGVSHFFRELAEEKREGYERLLKMQNQRGGRALFQDIKKPAEDEWGKTPDAMKAAMALEKKLNQALLDLHALGSARTDPHLCDFLETHFLDEEVKLIKKMGDHLTNLHRLGGPEAGLGEYLFERLTLKHD

SEQ ID NO: 1069 - protein, 183 aa, Homo sapiens
MTTASTSQVRQNYHQDSEAAINRQINLELYASYVYLSMSYYFDRDDVALKNFAKYFLHQSHEEREHAEKLMKLQNQRGGRIFLQDIKKPDCDDWESGLNAMECALHLEKNVNQSLLELHKLATDKNDPHLCDFIETHYLNEQVKAIKELGDHVTNLRKMGAPESGLAEYLFDKHTLGDSDNES

SEQ ID NO: 1070 - protein, 1207 aa, Homo sapiens
MLLTLIILLPVVSKFSFVSLSAPQHWSCPEGTLAGNGNSTCVGPAPFLIFSHGNSIFRIDTEGTNYEQLVVDAGVSVIMDFHYNEKRIYWVDLERQLLQRVFLNGSRQERVCNIEKNVSGMAINWINEEVIWSNQQEGIITVTDMKGNNSHILLSALKYPANVAVDPVERFIFWSSEVAGSLYRADLDGVGVKALLETSEKITAVSLDVLDKRLFWIQYNREGSNSLICSCDYDGGSVHISKHPTQHNLFAMSLFGDRIFYSTWKMKTIWIANKHTGKDMVRINLHSSFVPLGELKVVHPLAQPKAEDDTWEPEQKLCKLRKGNCSSTVCGQDLQSHLCMCAEGYALSRDRKYCEDVNECAFWNHGCTLGCKNTPGSYYCTCPVGFVLLPDGKRCHQLVSCPRNVSECSHDCVLTSEGPLCFCPEGSVLERDGKTCSGCSSPDNGGCSQLCVPLSPVSWECDCFPGYDLQLDEKSCAASGPQPFLLFANSQDIRHMHFDGTDYGTLLSQQMGMVYALDHDPVENKIYFAHTALKWIERANMDGSQRERLIEEGVDVPEGLAVDWIGRRFYWTDRGKSLIGRSDLNGKRSKIITKENISQPRGIAVHPMAKRLFWTDTGINPRIESSSLQGLGRLVIASSDLIWPSGITIDFLTDKLYWCDAKQSVIEMANLDGSKRRRLTQNDVGHPFAVAVFEDYVWFSDWAMPSVMRVNKRTGKDRVRLQGSMLKPSSLVVVHPLAKPGADPCLYQNGGCEHICKKRLGTAWCSCREGFMKASDGKTCLALDGHQLLAGGEVDLKNQVTPLDILSKTRVSEDNITESQHMLVAEIMVSDQDDCAPVGCSMYARCISEGEDATCQCLKGFAGDGKLCSDIDECEMGVPVCPPASSKCINTEGGYVCRCSEGYQGDGIHCLDIDECQLGEHSCGENASCTNTEGGYTCMCAGRLSEPGLICPDSTPPPHLREDDHHYSVRNSDSECPLSHDGYCLHDGVCMYIEALDKYACNCVVGYIGERCQYRDLKWWELRHAGHGQQQKVIVVAVCVVVLVMLLLLSLWGAHYYRTQKLLSKNPKNPYEESSRDVRSRRPADTEDGMSSCPQPWFVVIKEHQDLKNGGQPVAGEDGQAADGSMQPTSWRQEPQLCGMGTEQGCWIPVSSDKGSCPQVMERSFHMPSYGTQTLEGGVEKPHSLLSANPLWQQRALDPPHQMELTQ

SEQ ID NO: 1071 - protein, 1165 aa, Homo sapiens
MLLTLIILLPVVSKFSFVSLSAPQHWSCPEGTLAGNGNSTCVGPAPFLIFSHGNSIFRIDTEGTNYEQLVVDAGVSVIMDFHYNEKRIYWVDLERQLLQRVFLNGSRQERVCNIEKNVSGMAINWINEEVIWSNQQEGIITVTDMKGNNSHILLSALKYPANVAVDPVERFIFWSSEVAGSLYRADLDGVGVKALLETSEKITAVSLDVLDKRLFWIQYNREGSNSLICSCDYDGGSVHISKHPTQHNLFAMSLFGDRIFYSTWKMKTIWIANKHTGKDMVRINLHSSFVPLGELKVVHPLAQPKAEDDTWEPDVNECAFWNHGCTLGCKNTPGSYYCTCPVGFVLLPDGKRCHQLVSCPRNVSECSHDCVLTSEGPLCFCPEGSVLERDGKTCSGCSSPDNGGCSQLCVPLSPVSWECDCFPGYDLQLDEKSCAASGPQPFLLFANSQDIRHMHFDGTDYGTLLSQQMGMVYALDHDPVENKIYFAHTALKWIERANMDGSQRERLIEEGVDVPEGLAVDWIGRRFYWTDRGKSLIGRSDLNGKRSKIITKENISQPRGIAVHPMAKRLFWTDTGINPRIESSSLQGLGRLVIASSDLIWPSGITIDFLTDKLYWCDAKQSVIEMANLDGSKRRRLTQNDVGHPFAVAVFEDYVWFSDWAMPSVMRVNKRTGKDRVRLQGSMLKPSSLVVVHPLAKPGADPCLYQNGGCEHICKKRLGTAWCSCREGFMKASDGKTCLALDGHQLLAGGEVDLKNQVTPLDILSKTRVSEDNITESQHMLVAEIMVSDQDDCAPVGCSMYARCISEGEDATCQCLKGFAGDGKLCSDIDECEMGVPVCPPASSKCINTEGGYVCRCSEGYQGDGIHCLDIDECQLGEHSCGENASCTNTEGGYTCMCAGRLSEPGLICPDSTPPPHLREDDHHYSVRNSDSECPLSHDGYCLHDGVCMYIEALDKYACNCVVGYIGERCQYRDLKWWELRHAGHGQQQKVIVVAVCVVVLVMLLLLSLWGAHYYRTQKLLSKNPKNPYEESSRDVRSRRPADTEDGMSSCPQPWFVVIKEHQDLKNGGQPVAGEDGQAADGSMQPTSWRQEPQLCGMGTEQGCWIPVSSDKGSCPQVMERSFHMPSYGTQTLEGGVEKPHSLLSANPLWQQRALDPPHQMELTQ

SEQ ID NO: 1072 - protein, 1166 aa, Homo sapiens
MLLTLIILLPVVSKFSFVSLSAPQHWSCPEGTLAGNGNSTCVGPAPFLIFSHGNSIFRIDTEGTNYEQLVVDAGVSVIMDFHYNEKRIYWVDLERQLLQRVFLNGSRQERVCNIEKNVSGMAINWINEEVIWSNQQEGIITVTDMKGNNSHILLSALKYPANVAVDPVERFIFWSSEVAGSLYRADLDGVGVKALLETSEKITAVSLDVLDKRLFWIQYNREGSNSLICSCDYDGGSVHISKHPTQHNLFAMSLFGDRIFYSTWKMKTIWIANKHTGKDMVRINLHSSFVPLGELKVVHPLAQPKAEDDTWEPEQKLCKLRKGNCSSTVCGQDLQSHLCMCAEGYALSRDRKYCEDVNECAFWNHGCTLGCKNTPGSYYCTCPVGFVLLPDGKRCHQLVSCPRNVSECSHDCVLTSEGPLCFCPEGSVLERDGKTCSGCSSPDNGGCSQLCVPLSPVSWECDCFPGYDLQLDEKSCAASGPQPFLLFANSQDIRHMHFDGTDYGTLLSQQMGMVYALDHDPVENKIYFAHTALKWIERANMDGSQRERLIEEGVDVPEGLAVDWIGRRFYWTDRGKSLIGRSDLNGKRSKIITKENISQPRGIAVHPMAKRLFWTDTGINPRIESSSLQGLGRLVIASSDLIWPSGITIDFLTDKLYWCDAKQSVIEMANLDGSKRRRLTQNDVGHPFAVAVFEDYVWFSDWAMPSVMRVNKRTGKDRVRLQGSMLKPSSLVVVHPLAKPGADPCLYQNGGCEHICKKRLGTAWCSCREGFMKASDGKTCLALDGHQLLAGGEVDLKNQVTPLDILSKTRVSEDNITESQHMLVAEIMVSDQDDCAPVGCSMYARCISEGEDATCQCLKGFAGDGKLCSDIDECEMGVPVCPPASSKCINTEGGYVCRCSEGYQGDGIHCLDSTPPPHLREDDHHYSVRNSDSECPLSHDGYCLHDGVCMYIEALDKYACNCVVGYIGERCQYRDLKWWELRHAGHGQQQKVIVVAVCVVVLVMLLLLSLWGAHYYRTQKLLSKNPKNPYEESSRDVRSRRPADTEDGMSSCPQPWFVVIKEHQDLKNGGQPVAGEDGQAADGSMQPTSWRQEPQLCGMGTEQGCWIPVSSDKGSCPQVMERSFHMPSYGTQTLEGGVEKPHSLLSANPLWQQRALDPPHQMELTQ

SEQ ID NO: 1073 - protein, 369 aa, Homo sapiens
MLKPSLPFTSLLFLQLPLLGVGLNTTILTPNGNEDTTADFFLTTMPTDSLSVSTLPLPEVQCFVFNVEYMNCTWNSSSEPQPTNLTLHYWYKNSDNDKVQKCSHYLFSEEITSGCQLQKKEIHLYQTFVVQLQDPREPRRQATQMLKLQNLVIPWAPENLTLHKLSESQLELNWNNRFLNHCLEHLVQYRTDWDHSWTEQSVDYRHKFSLPSVDGQKRYTFRVRSRFNPLCGSAQHWSEWSHPIHWGSNTSKENPFLFALEAVVISVGSMGLIISLLCVYFWLERTMPRIPTLKNLEDLVTEYHGNFSAWSGVSKGLAESLQPDYSERLCLVSEIPPKGGALGEGPGASPCNQHSPYWAPPCYTLKPET

SEQ ID NO: 1074 - protein, 179 aa, Homo sapiens
MGMKTPQLEQSVDYRHKFSLPSVDGQKRYTFRVRSRFNPLCGSAQHWSEWSHPIHWGSNTSKENPFLFALEAVVISVGSMGLIISLLCVYFWLERTMPRIPTLKNLEDLVTEYHGNFSAWSGVSKGLAESLQPDYSERLCLVSEIPPKGGALGEGPGASPCNQHSPYWAPPCYTLKPET

SEQ ID NO: 1075 - protein, 272 aa, Homo sapiens; identical to SEQ ID NO: 1035

SEQ ID NO: 1076 - protein, 2201 aa, Homo sapiens
MGAMTQLLAGVFLAFLALATEGGVLKKVIRHKRQSGVNATLPEENQPVVFNHVYNIKLPVGSQCSVDLESASGEKDLAPPSEPSESFQEHTVDGENQIVFTHRINIPRRACGCAAAPDVKELLSRLEELENLVSSLREQCTAGAGCCLQPATGRLDTRPFCSGRGNFSTEGCGCVCEPGWKGPNCSEPECPGNCHLRGRCIDGQCICDDGFTGEDCSQLACPSDCNDQGKCVNGVCICFEGYAGADCSREICPVPCSEEHGTCVDGLCVCHDGFAGDDCNKPLCLNNCYNRGRCVENECVCDEGFTGEDCSELICPNDCFDRGRCINGTCYCEEGFTGEDCGKPTCPHACHTQGRCEEGQCVCDEGFAGVDCSEKRCPADCHNRGRCVDGRCECDDGFTGADCGELKCPNGCSGHGRCVNGQCVCDEGYTGEDCSQLRCPNDCHSRGRCVEGKCVCEQGFKGYDCSDMSCPNDCHQHGRCVNGMCVCDDGYTGEDCRDRQCPRDCSNRGLCVDGQCVCEDGFTGPDCAELSCPNDCHGQGRCVNGQCVCHEGFMGKDCKEQRCPSDCHGQGRCVDGQCICHEGFTGLDCGQHSCPSDCNNLGQCVSGRCICNEGYSGEDCSEVSPPKDLVVTEVTEETVNLAWDNEMRVTEYLVVYTPTHEGGLEMQFRVPGDQTSTIIQELEPGVEYFIRVFAILENKKSIPVSARVATYLPAPEGLKFKSIKETSVEVEWDPLDIAFETWEIIFRNMNKEDEGEITKSLRRPETSYRQTGLAPGQEYEISLHIVKNNTRGPGLKRVTTTRLDAPSQIEVKDVTDTTALITWFKPLAEIDGIELTYGIKDVPGDRTTIDLTEDENQYSIGNLKPDTEYEVSLISRRGDMSSNPAKETFTTGLDAPRNLRRVSQTDNSITLEWRNGKAAIDSYRIKYAPISGGDHAEVDVPKSQQATTKTTLTGLRPGTEYGIGVSAVKEDKESNPATINAATELDTPKDLQVSETAETSLTLLWKTPLAKFDRYRLNYSLPTGQWVGVQLPRNTTSYVLRGLEPGQEYNVLLTAEKGRHKSKPARVKASTEQAPELENLTVTEVGWDGLRLNWTAADQAYEHFIIQVQEANKVEAARNLTVPGSLRAVDIPGLKAATPYTVSIYGVIQGYRTPVLSAEASTGETPNLGEVVVAEVGWDALKLNWTAPEGAYEYFFIQVQEADTVEAAQNLTVPGGLRSTDLPGLKAATHYTITIRGVTQDFSTTPLSVEVLTEEVPDMGNLTVTEVSWDALRLNWTTPDGTYDQFTIQVQEADQVEEAHNLTVPGSLRSMEIPGLRAGTPYTVTLHGEVRGHSTRPLAVEVVTEDLPQLGDLAVSEVGWDGLRLNWTAADNAYEHFVIQVQEVNKVEAAQNLTLPGSLRAVDIPGLEAATPYRVSIYGVIRGYRTPVLSAEASTAKEPEIGNLNVSDITPESFNLSWMATDGIFETFTIEIIDSNRLLETVEYNISGAERTAHISGLPPSTDFIVYLSGLAPSIRTKTISATATTEALPLLENLTISDINPYGFTVSWMASENAFDSFLVTVVDSGKLLDPQEFTLSGTQRKLELRGLITGIGYEVMVSGFTQGHQTKPLRAEIVTEAEPEVDNLLVSDATPDGFRLSWTADEGVFDNFVLKIRDTKKQSEPLEITLLAPERTRDITGLREATEYEIELYGISKGRRSQTVSAIATTAMGSPKEVIFSDITENSATVSWRAPTAQVESFRITYVPITGGTPSMVTVDGTKTQTRLVKLIPGVEYLVSIIAMKGFEESEPVSGSFTTALDGPSGLVTANITDSEALARWQPAIATVDSYVISYTGEKVPEITRTVSGNTVEYALTDLEPATEYTLRIFAEKGPQKSSTITAKFTTDLDSPRDLTATEVQSETALLTWRPPRASVTGYLLVYESVDGTVKEVIVGPDTTSYSLADLSPSTHYTAKIQALNGPLRSNMIQTIFTTIGLLYPFPKDCSQAMLNGDTTSGLYTIYLNGDKAEALEVFCDMTSDGGGWIVFLRRKNGRENFYQNWKAYAAGFGDRREEFWLGLDNLNKITAQGQYELRVDLRDHGETAFAVYDKFSVGDAKTRYKLKVEGYSGTAGDSMAYHNGRSFSTFDKDTDSAITNCALSYKGAFWYRNCHRVNLMGRYGDNNHSQGVNWFHWKGHEHSIQFAEMKLRPSNFRNLEGRRKRA

SEQ ID NO: 1077 - protein, 1746 aa, Homo sapiens
MGAMTQLLAGVFLAFLALATEGGVLKKVIRHKRQSGVNATLPEENQPVVFNHVYNIKLPVGSQCSVDLESASGEKDLAPPSEPSESFQEHTVDGENQIVFTHRINIPRRACGCAAAPDVKELLSRLEELENLVSSLREQCTAGAGCCLQPATGRLDTRPFCSGRGNFSTEGCGCVCEPGWKGPNCSEPECPGNCHLRGRCIDGQCICDDGFTGEDCSQLACPSDCNDQGKCVNGVCICFEGYAGADCSREICPVPCSEEHGTCVDGLCVCHDGFAGDDCNKPLCLNNCYNRGRCVENECVCDEGFTGEDCSELICPNDCFDRGRCINGTCYCEEGFTGEDCGKPTCPHACHTQGRCEEGQCVCDEGFAGVDCSEKRCPADCHNRGRCVDGRCECDDGFTGADCGELKCPNGCSGHGRCVNGQCVCDEGYTGEDCSQLRCPNDCHSRGRCVEGKCVCEQGFKGYDCSDMSCPNDCHQHGRCVNGMCVCDDGYTGEDCRDRQCPRDCSNRGLCVDGQCVCEDGFTGPDCAELSCPNDCHGQGRCVNGQCVCHEGFMGKDCKEQRCPSDCHGQGRCVDGQCICHEGFTGLDCGQHSCPSDCNNLGQCVSGRCICNEGYSGEDCSEVSPPKDLVVTEVTEETVNLAWDNEMRVTEYLVVYTPTHEGGLEMQFRVPGDQTSTIIQELEPGVEYFIRVFAILENKKSIPVSARVATYLPAPEGLKFKSIKETSVEVEWDPLDIAFETWEIIFRNMNKEDEGEITKSLRRPETSYRQTGLAPGQEYEISLHIVKNNTRGPGLKRVTTTRLDAPSQIEVKDVTDTTALITWFKPLAEIDGIELTYGIKDVPGDRTTIDLTEDENQYSIGNLKPDTEYEVSLISRRGDMSSNPAKETFTTGLDAPRNLRRVSQTDNSITLEWRNGKAAIDSYRIKYAPISGGDHAEVDVPKSQQATTKTTLTGLRPGTEYGIGVSAVKEDKESNPATINAATELDTPKDLQVSETAETSLTLLWKTPLAKFDRYRLNYSLPTGQWVGVQLPRNTTSYVLRGLEPGQEYNVLLTAEKGRHKSKPARVKASTAKEPEIGNLNVSDITPESFNLSWMATDGIFETFTIEIIDSNRLLETVEYNISGAERTAHISGLPPSTDFIVYLSGLAPSIRTKTISATATTEAEPEVDNLLVSDATPDGFRLSWTADEGVFDNFVLKIRDTKKQSEPLEITLLAPERTRDITGLREATEYEIELYGISKGRRSQTVSAIATTAMGSPKEVIFSDITENSATVSWRAPTAQVESFRITYVPITGGTPSMVTVDGTKTQTRLVKLIPGVEYLVSIIAMKGFEESEPVSGSFTTALDGPSGLVTANITDSEALARWQPAIATVDSYVISYTGEKVPEITRTVSGNTVEYALTDLEPATEYTLRIFAEKGPQKSSTITAKFTTDLDSPRDLTATEVQSETALLTWRPPRASVTGYLLVYESVDGTVKEVIVGPDTTSYSLADLSPSTHYTAKIQALNGPLRSNMIQTIFTTIGLLYPFPKDCSQAMLNGDTTSGLYTIYLNGDKAEALEVFCDMTSDGGGWIVFLRRKNGRENFYQNWKAYAAGFGDRREEFWLGLDNLNKITAQGQYELRVDLRDHGETAFAVYDKFSVGDAKTRYKLKVEGYSGTAGDSMAYHNGRSFSTFDKDTDSAITNCALSYKGAFWYRNCHRVNLMGRYGDNNHSQGVNWFHWKGHEHSIQFAEMKLRPSNFRNLEGRRKRA

SEQ ID NO: 1078 - protein, 1837 aa, Homo sapiens
MGAMTQLLAGVFLAFLALATEGGVLKKVIRHKRQSGVNATLPEENQPVVFNHVYNIKLPVGSQCSVDLESASGEKDLAPPSEPSESFQEHTVDGENQIVFTHRINIPRRACGCAAAPDVKELLSRLEELENLVSSLREQCTAGAGCCLQPATGRLDTRPFCSGRGNFSTEGCGCVCEPGWKGPNCSEPECPGNCHLRGRCIDGQCICDDGFTGEDCSQLACPSDCNDQGKCVNGVCICFEGYAGADCSREICPVPCSEEHGTCVDGLCVCHDGFAGDDCNKPLCLNNCYNRGRCVENECVCDEGFTGEDCSELICPNDCFDRGRCINGTCYCEEGFTGEDCGKPTCPHACHTQGRCEEGQCVCDEGFAGVDCSEKRCPADCHNRGRCVDGRCECDDGFTGADCGELKCPNGCSGHGRCVNGQCVCDEGYTGEDCSQLRCPNDCHSRGRCVEGKCVCEQGFKGYDCSDMSCPNDCHQHGRCVNGMCVCDDGYTGEDCRDRQCPRDCSNRGLCVDGQCVCEDGFTGPDCAELSCPNDCHGQGRCVNGQCVCHEGFMGKDCKEQRCPSDCHGQGRCVDGQCICHEGFTGLDCGQHSCPSDCNNLGQCVSGRCICNEGYSGEDCSEVSPPKDLVVTEVTEETVNLAWDNEMRVTEYLVVYTPTHEGGLEMQFRVPGDQTSTIIQELEPGVEYFIRVFAILENKKSIPVSARVATYLPAPEGLKFKSIKETSVEVEWDPLDIAFETWEIIFRNMNKEDEGEITKSLRRPETSYRQTGLAPGQEYEISLHIVKNNTRGPGLKRVTTTRLDAPSQIEVKDVTDTTALITWFKPLAEIDGIELTYGIKDVPGDRTTIDLTEDENQYSIGNLKPDTEYEVSLISRRGDMSSNPAKETFTTGLDAPRNLRRVSQTDNSITLEWRNGKAAIDSYRIKYAPISGGDHAEVDVPKSQQATTKTTLTGLRPGTEYGIGVSAVKEDKESNPATINAATELDTPKDLQVSETAETSLTLLWKTPLAKFDRYRLNYSLPTGQWVGVQLPRNTTSYVLRGLEPGQEYNVLLTAEKGRHKSKPARVKASTAKEPEIGNLNVSDITPESFNLSWMATDGIFETFTIEIIDSNRLLETVEYNISGAERTAHISGLPPSTDFIVYLSGLAPSIRTKTISATATTEALPLLENLTISDINPYGFTVSWMASENAFDSFLVTVVDSGKLLDPQEFTLSGTQRKLELRGLITGIGYEVMVSGFTQGHQTKPLRAEIVTEAEPEVDNLLVSDATPDGFRLSWTADEGVFDNFVLKIRDTKKQSEPLEITLLAPERTRDITGLREATEYEIELYGISKGRRSQTVSAIATTAMGSPKEVIFSDITENSATVSWRAPTAQVESFRITYVPITGGTPSMVTVDGTKTQTRLVKLIPGVEYLVSIIAMKGFEESEPVSGSFTTALDGPSGLVTANITDSEALARWQPAIATVDSYVISYTGEKVPEITRTVSGNTVEYALTDLEPATEYTLRIFAEKGPQKSSTITAKFTTDLDSPRDLTATEVQSETALLTWRPPRASVTGYLLVYESVDGTVKEVIVGPDTTSYSLADLSPSTHYTAKIQALNGPLRSNMIQTIFTTIGLLYPFPKDCSQAMLNGDTTSGLYTIYLNGDKAEALEVFCDMTSDGGGWIVFLRRKNGRENFYQNWKAYAAGFGDRREEFWLGLDNLNKITAQGQYELRVDLRDHGETAFAVYDKFSVGDAKTRYKLKVEGYSGTAGDSMAYHNGRSFSTFDKDTDSAITNCALSYKGAFWYRNCHRVNLMGRYGDNNHSQGVNWFHWKGHEHSIQFAEMKLRPSNFRNLEGRRKRA

SEQ ID NO: 1079 - protein, 2110 aa, Homo sapiens
MGAMTQLLAGVFLAFLALATEGGVLKKVIRHKRQSGVNATLPEENQPVVFNHVYNIKLPVGSQCSVDLESASGEKDLAPPSEPSESFQEHTVDGENQIVFTHRINIPRRACGCAAAPDVKELLSRLEELENLVSSLREQCTAGAGCCLQPATGRLDTRPFCSGRGNFSTEGCGCVCEPGWKGPNCSEPECPGNCHLRGRCIDGQCICDDGFTGEDCSQLACPSDCNDQGKCVNGVCICFEGYAGADCSREICPVPCSEEHGTCVDGLCVCHDGFAGDDCNKPLCLNNCYNRGRCVENECVCDEGFTGEDCSELICPNDCFDRGRCINGTCYCEEGFTGEDCGKPTCPHACHTQGRCEEGQCVCDEGFAGVDCSEKRCPADCHNRGRCVDGRCECDDGFTGADCGELKCPNGCSGHGRCVNGQCVCDEGYTGEDCSQLRCPNDCHSRGRCVEGKCVCEQGFKGYDCSDMSCPNDCHQHGRCVNGMCVCDDGYTGEDCRDRQCPRDCSNRGLCVDGQCVCEDGFTGPDCAELSCPNDCHGQGRCVNGQCVCHEGFMGKDCKEQRCPSDCHGQGRCVDGQCICHEGFTGLDCGQHSCPSDCNNLGQCVSGRCICNEGYSGEDCSEVSPPKDLVVTEVTEETVNLAWDNEMRVTEYLVVYTPTHEGGLEMQFRVPGDQTSTIIQELEPGVEYFIRVFAILENKKSIPVSARVATYLPAPEGLKFKSIKETSVEVEWDPLDIAFETWEIIFRNMNKEDEGEITKSLRRPETSYRQTGLAPGQEYEISLHIVKNNTRGPGLKRVTTTRLDAPSQIEVKDVTDTTALITWFKPLAEIDGIELTYGIKDVPGDRTTIDLTEDENQYSIGNLKPDTEYEVSLISRRGDMSSNPAKETFTTGLDAPRNLRRVSQTDNSITLEWRNGKAAIDSYRIKYAPISGGDHAEVDVPKSQQATTKTTLTGLRPGTEYGIGVSAVKEDKESNPATINAATELDTPKDLQVSETAETSLTLLWKTPLAKFDRYRLNYSLPTGQWVGVQLPRNTTSYVLRGLEPGQEYNVLLTAEKGRHKSKPARVKASTEQAPELENLTVTEVGWDGLRLNWTAADQAYEHFIIQVQEANKVEAARNLTVPGSLRAVDIPGLKAATPYTVSIYGVIQGYRTPVLSAEASTGETPNLGEVVVAEVGWDALKLNWTAPEGAYEYFFIQVQEADTVEAAQNLTVPGGLRSTDLPGLKAATHYTITIRGVTQDFSTTPLSVEVLTEEVPDMGNLTVTEVSWDALRLNWTTPDGTYDQFTIQVQEADQVEEAHNLTVPGSLRSMEIPGLRAGTPYTVTLHGEVRGHSTRPLAVEVVTEDLPQLGDLAVSEVGWDGLRLNWTAADNAYEHFVIQVQEVNKVEAAQNLTLPGSLRAVDIPGLEAATPYRVSIYGVIRGYRTPVLSAEASTAKEPEIGNLNVSDITPESFNLSWMATDGIFETFTIEIIDSNRLLETVEYNISGAERTAHISGLPPSTDFIVYLSGLAPSIRTKTISATATTEAEPEVDNLLVSDATPDGFRLSWTADEGVFDNFVLKIRDTKKQSEPLEITLLAPERTRDITGLREATEYEIELYGISKGRRSQTVSAIATTAMGSPKEVIFSDITENSATVSWRAPTAQVESFRITYVPITGGTPSMVTVDGTKTQTRLVKLIPGVEYLVSIIAMKGFEESEPVSGSFTTALDGPSGLVTANITDSEALARWQPAIATVDSYVISYTGEKVPEITRTVSGNTVEYALTDLEPATEYTLRIFAEKGPQKSSTITAKFTTDLDSPRDLTATEVQSETALLTWRPPRASVTGYLLVYESVDGTVKEVIVGPDTTSYSLADLSPSTHYTAKIQALNGPLRSNMIQTIFTTIGLLYPFPKDCSQAMLNGDTTSGLYTIYLNGDKAEALEVFCDMTSDGGGWIVFLRRKNGRENFYQNWKAYAAGFGDRREEFWLGLDNLNKITAQGQYELRVDLRDHGETAFAVYDKFSVGDAKTRYKLKVEGYSGTAGDSMAYHNGRSFSTFDKDTDSAITNCALSYKGAFWYRNCHRVNLMGRYGDNNHSQGVNWFHWKGHEHSIQFAEMKLRPSNFRNLEGRRKRA

SEQ ID NO: 1080 - protein, 1655 aa, Homo sapiens
MGAMTQLLAGVFLAFLALATEGGVLKKVIRHKRQSGVNATLPEENQPVVFNHVYNIKLPVGSQCSVDLESASGEKDLAPPSEPSESFQEHTVDGENQIVFTHRINIPRRACGCAAAPDVKELLSRLEELENLVSSLREQCTAGAGCCLQPATGRLDTRPFCSGRGNFSTEGCGCVCEPGWKGPNCSEPECPGNCHLRGRCIDGQCICDDGFTGEDCSQLACPSDCNDQGKCVNGVCICFEGYAGADCSREICPVPCSEEHGTCVDGLCVCHDGFAGDDCNKPLCLNNCYNRGRCVENECVCDEGFTGEDCSELICPNDCFDRGRCINGTCYCEEGFTGEDCGKPTCPHACHTQGRCEEGQCVCDEGFAGVDCSEKRCPADCHNRGRCVDGRCECDDGFTGADCGELKCPNGCSGHGRCVNGQCVCDEGYTGEDCSQLRCPNDCHSRGRCVEGKCVCEQGFKGYDCSDMSCPNDCHQHGRCVNGMCVCDDGYTGEDCRDRQCPRDCSNRGLCVDGQCVCEDGFTGPDCAELSCPNDCHGQGRCVNGQCVCHEGFMGKDCKEQRCPSDCHGQGRCVDGQCICHEGFTGLDCGQHSCPSDCNNLGQCVSGRCICNEGYSGEDCSEVSPPKDLVVTEVTEETVNLAWDNEMRVTEYLVVYTPTHEGGLEMQFRVPGDQTSTIIQELEPGVEYFIRVFAILENKKSIPVSARVATYLPAPEGLKFKSIKETSVEVEWDPLDIAFETWEIIFRNMNKEDEGEITKSLRRPETSYRQTGLAPGQEYEISLHIVKNNTRGPGLKRVTTTRLDAPSQIEVKDVTDTTALITWFKPLAEIDGIELTYGIKDVPGDRTTIDLTEDENQYSIGNLKPDTEYEVSLISRRGDMSSNPAKETFTTGLDAPRNLRRVSQTDNSITLEWRNGKAAIDSYRIKYAPISGGDHAEVDVPKSQQATTKTTLTGLRPGTEYGIGVSAVKEDKESNPATINAATELDTPKDLQVSETAETSLTLLWKTPLAKFDRYRLNYSLPTGQWVGVQLPRNTTSYVLRGLEPGQEYNVLLTAEKGRHKSKPARVKASTEAEPEVDNLLVSDATPDGFRLSWTADEGVFDNFVLKIRDTKKQSEPLEITLLAPERTRDITGLREATEYEIELYGISKGRRSQTVSAIATTAMGSPKEVIFSDITENSATVSWRAPTAQVESFRITYVPITGGTPSMVTVDGTKTQTRLVKLIPGVEYLVSIIAMKGFEESEPVSGSFTTALDGPSGLVTANITDSEALARWQPAIATVDSYVISYTGEKVPEITRTVSGNTVEYALTDLEPATEYTLRIFAEKGPQKSSTITAKFTTDLDSPRDLTATEVQSETALLTWRPPRASVTGYLLVYESVDGTVKEVIVGPDTTSYSLADLSPSTHYTAKIQALNGPLRSNMIQTIFTTIGLLYPFPKDCSQAMLNGDTTSGLYTIYLNGDKAEALEVFCDMTSDGGGWIVFLRRKNGRENFYQNWKAYAAGFGDRREEFWLGLDNLNKITAQGQYELRVDLRDHGETAFAVYDKFSVGDAKTRYKLKVEGYSGTAGDSMAYHNGRSFSTFDKDTDSAITNCALSYKGAFWYRNCHRVNLMGRYGDNNHSQGVNWFHWKGHEHSIQFAEMKLRPSNFRNLEGRRKRA

SEQ ID NO: 1081 - protein, 1564 aa, Homo sapiens
MGAMTQLLAGVFLAFLALATEGGVLKKVIRHKRQSGVNATLPEENQPVVFNHVYNIKLPVGSQCSVDLESASGEKDLAPPSEPSESFQEHTVDGENQIVFTHRINIPRRACGCAAAPDVKELLSRLEELENLVSSLREQCTAGAGCCLQPATGRLDTRPFCSGRGNFSTEGCGCVCEPGWKGPNCSEPECPGNCHLRGRCIDGQCICDDGFTGEDCSQLACPSDCNDQGKCVNGVCICFEGYAGADCSREICPVPCSEEHGTCVDGLCVCHDGFAGDDCNKPLCLNNCYNRGRCVENECVCDEGFTGEDCSELICPNDCFDRGRCINGTCYCEEGFTGEDCGKPTCPHACHTQGRCEEGQCVCDEGFAGVDCSEKRCPADCHNRGRCVDGRCECDDGFTGADCGELKCPNGCSGHGRCVNGQCVCDEGYTGEDCSQLRCPNDCHSRGRCVEGKCVCEQGFKGYDCSDMSCPNDCHQHGRCVNGMCVCDDGYTGEDCRDRQCPRDCSNRGLCVDGQCVCEDGFTGPDCAELSCPNDCHGQGRCVNGQCVCHEGFMGKDCKEQRCPSDCHGQGRCVDGQCICHEGFTGLDCGQHSCPSDCNNLGQCVSGRCICNEGYSGEDCSEVSPPKDLVVTEVTEETVNLAWDNEMRVTEYLVVYTPTHEGGLEMQFRVPGDQTSTIIQELEPGVEYFIRVFAILENKKSIPVSARVATYLPAPEGLKFKSIKETSVEVEWDPLDIAFETWEIIFRNMNKEDEGEITKSLRRPETSYRQTGLAPGQEYEISLHIVKNNTRGPGLKRVTTTRLDAPSQIEVKDVTDTTALITWFKPLAEIDGIELTYGIKDVPGDRTTIDLTEDENQYSIGNLKPDTEYEVSLISRRGDMSSNPAKETFTTGLDAPRNLRRVSQTDNSITLEWRNGKAAIDSYRIKYAPISGGDHAEVDVPKSQQATTKTTLTGLRPGTEYGIGVSAVKEDKESNPATINAATELDTPKDLQVSETAETSLTLLWKTPLAKFDRYRLNYSLPTGQWVGVQLPRNTTSYVLRGLEPGQEYNVLLTAEKGRHKSKPARVKASTAMGSPKEVIFSDITENSATVSWRAPTAQVESFRITYVPITGGTPSMVTVDGTKTQTRLVKLIPGVEYLVSIIAMKGFEESEPVSGSFTTALDGPSGLVTANITDSEALARWQPAIATVDSYVISYTGEKVPEITRTVSGNTVEYALTDLEPATEYTLRIFAEKGPQKSSTITAKFTTDLDSPRDLTATEVQSETALLTWRPPRASVTGYLLVYESVDGTVKEVIVGPDTTSYSLADLSPSTHYTAKIQALNGPLRSNMIQTIFTTIGLLYPFPKDCSQAMLNGDTTSGLYTIYLNGDKAEALEVFCDMTSDGGGWIVFLRRKNGRENFYQNWKAYAAGFGDRREEFWLGLDNLNKITAQGQYELRVDLRDHGETAFAVYDKFSVGDAKTRYKLKVEGYSGTAGDSMAYHNGRSFSTFDKDTDSAITNCALSYKGAFWYRNCHRVNLMGRYGDNNHSQGVNWFHWKGHEHSIQFAEMKLRPSNFRNLEGRRKRA

SEQ ID NO: 1082 - protein, 757 aa, Homo sapiens
MLLRLLLAWAAAGPTLGQDPWAAEPRAACGPSSCYALFPRRRTFLEAWRACRELGGDLATPRTPEEAQRVDSLVGAGPASRLLWIGLQRQARQCQLQRPLRGFTWTTGDQDTAFTNWAQPASGGPCPAQRCVALEASGEHRWLEGSCTLAVDGYLCQFGFEGACPALQDEAGQAGPAVYTTPFHLVSTEFEWLPFGSVAAVQCQAGRGASLLCVKQPEGGVGWSRAGPLCLGTGCSPDNGGCEHECVEEVDGHVSCRCTEGFRLAADGRSCEDPCAQAPCEQQCEPGGPQGYSCHCRLGFRPAEDDPHRCVDTDECQIAGVCQQMCVNYVGGFECYCSEGHELEADGISCSPAGAMGAQASQDLGDELLDDGEDEEDEDEAWKAFNGGWTEMPGILWMEPTQPPDFALAYRPSFPEDREPQIPYPEPTWPPPLSAPRVPYHSSVLSVTRPVVVSATHPTLPSAHQPPVIPATHPALSRDHQIPVIAANYPDLPSAYQPGILSVSHSAQPPAHQPPMISTKYPELFPAHQSPMFPDTRVAGTQTTTHLPGIPPNHAPLVTTLGAQLPPQAPDALVLRTQATQLPIIPTAQPSLTTTSRSPVSPAHQISVPAATQPAALPTLLPSQSPTNQTSPISPTHPHSKAPQIPREDGPSPKLALWLPSPAPTAAPTALGEAGLAEHSQRDDRWLLVALLVPTCVFLVVLLALGIVYCTRCGPHAPNKRITDCYRWVIHAGSKSPTEPMPPRGSLTGVQTCRTSV

SEQ ID NO: 1083 - protein, 433 aa, Homo sapiens
MCVNYVGGFECYCSEGHELEADGISCSPAGAMGAQASQDLGDELLDDGEDEEDEDEAWKAFNGGWTEMPGILWMEPTQPPDFALAYRPSFPEDREPQIPYPEPTWPPPLSAPRVPYHSSVLSVTRPVVVSATHPTLPSAHQPPVIPATHPALSRDHQIPVIAANYPDLPSAYQPGILSVSHSAQPPAHQPPMISTKYPELFPAHQSPMFPDTRVAGTQTTTHLPGIPPNHAPLVTTLGAQLPPQAPDALVLRTQATQLPIIPTAQPSLTTTSRSPVSPAHQISVPAATQPAALPTLLPSQSPTNQTSPISPTHPHSKAPQIPREDGPSPKLALWLPSPAPTAAPTALGEAGLAEHSQRDDRWLLVALLVPTCVFLVVLLALGIVYCTRCGPHAPNKRITDCYRWVIHAGSKSPTEPMPPRGSLTGVQTCRTSV

SEQ ID NO: 1084 - protein, 232 aa, Homo sapiens
MNFLLSWVHWSLALLLYLHHAKWSQAAPMAEGGGQNHHEVVKFMDVYQRSYCHPIETLVDIFQEYPDEIEYIFKPSCVPLMRCGGCCNDEGLECVPTEESNITMQIMRIKPHQGQHIGEMSFLQHNKCECRPKKDRARQEKKSVRGKGKGQKRKRKKSRYKSWSVYVGARCCLMPWSLPGPHPCGPCSERRKHLFVQDPQTCKCSCKNTDSRCKARQLELNERTCRCDKPRR

SEQ ID NO: 1085 - protein, 215 aa, Homo sapiens
MNFLLSWVHWSLALLLYLHHAKWSQAAPMAEGGGQNHHEVVKFMDVYQRSYCHPIETLVDIFQEYPDEIEYIFKPSCVPLMRCGGCCNDEGLECVPTEESNITMQIMRIKPHQGQHIGEMSFLQHNKCECRPKKDRARQEKKSVRGKGKGQKRKRKKSRYKSWSVPCGPCSERRKHLFVQDPQTCKCSCKNTDSRCKARQLELNERTCRCDKPRR

SEQ ID NO: 1086 - protein, 209 aa, Homo sapiens
MNFLLSWVHWSLALLLYLHHAKWSQAAPMAEGGGQNHHEVVKFMDVYQRSYCHPIETLVDIFQEYPDEIEYIFKPSCVPLMRCGGCCNDEGLECVPTEESNITMQIMRIKPHQGQHIGEMSFLQHNKCECRPKKDRARQEKKSVRGKGKGQKRKRKKSRPCGPCSERRKHLFVQDPQTCKCSCKNTDSRCKARQLELNERTCRCDKPRR

SEQ ID NO: 1087 - protein, 191 aa, Homo sapiens
MNFLLSWVHWSLALLLYLHHAKWSQAAPMAEGGGQNHHEVVKFMDVYQRSYCHPIETLVDIFQEYPDEIEYIFKPSCVPLMRCGGCCNDEGLECVPTEESNITMQIMRIKPHQGQHIGEMSFLQHNKCECRPKKDRARQENPCGPCSERRKHLFVQDPQTCKCSCKNTDSRCKARQLELNERTCRCDKPRR

SEQ ID NO: 1088 - protein, 174 aa, Homo sapiens
MNFLLSWVHWSLALLLYLHHAKWSQAAPMAEGGGQNHHEVVKFMDVYQRSYCHPIETLVDIFQEYPDEIEYIFKPSCVPLMRCGGCCNDEGLECVPTEESNITMQIMRIKPHQGQHIGEMSFLQHNKCECRPKKDRARQENPCGPCSERRKHLFVQDPQTCKCSCKNTDSRCKM

SEQ ID NO: 1089 - protein, 171 aa, Homo sapiens
MNFLLSWVHWSLALLLYLHHAKWSQAAPMAEGGGQNHHEVVKFMDVYQRSYCHPIETLVDIFQEYPDEIEYIFKPSCVPLMRCGGCCNDEGLECVPTEESNITMQIMRIKPHQGQHIGEMSFLQHNKCECRPKKDRARQEKKSVRGKGKGQKRKRKKSRYKSWSVCDKPRR

SEQ ID NO: 1090 - protein, 191 aa, Homo sapiens
MNFLLSWVHWSLALLLYLHHAKWSQAAPMAEGGGQNHHEVVKFMDVYQRSYCHPIETLVDIFQEYPDEIEYIFKPSCVPLMRCGGCCNDEGLECVPTEESNITMQIMRIKPHQGQHIGEMSFLQHNKCECRPKKDRARQENPCGPCSERRKHLFVQDPQTCKCSCKNTDSRCKARQLELNERTCRSLTRKD

SEQ ID NO: 1091 - protein, 147 aa, Homo sapiens
MNFLLSWVHWSLALLLYLHHAKWSQAAPMAEGGGQNHHEVVKFMDVYQRSYCHPIETLVDIFQEYPDEIEYIFKPSCVPLMRCGGCCNDEGLECVPTEESNITMQIMRIKPHQGQHIGEMSFLQHNKCECRPKKDRARQEKCDKPRR

SEQ ID NO: 1092 - protein, 137 aa, Homo sapiens
MNFLLSWVHWSLALLLYLHHAKWSQAAPMAEGGGQNHHEVVKFMDVYQRSYCHPIETLVDIFQEYPDEIEYIFKPSCVPLMRCGGCCNDEGLECVPTEESNITMQIMRIKPHQGQHIGEMSFLQHNKCECRCDKPRR

SEQ ID NO: 1093 - protein, 371 aa, Homo sapiens
MTDRQTDTAPSPSYHLLPGRRRTVDAAASRGQGPEPAPGGGVEGVGARGVALKLFVQLLGCSRFGGAVVRAGEAEPSGAARSASSGREEPQPEEGEEEEEKEEERGPQWRLGARKPGSWTGEAAVCADSAPAARAPQALARASGRGGRVARRGAEESGPPHSPSRRGSASRAGPGRASETMNFLLSWVHWSLALLLYLHHAKWSQAAPMAEGGGQNHHEVVKFMDVYQRSYCHPIETLVDIFQEYPDEIEYIFKPSCVPLMRCGGCCNDEGLECVPTEESNITMQIMRIKPHQGQHIGEMSFLQHNKCECRPKKDRARQENPCGPCSERRKHLFVQDPQTCKCSCKNTDSRCKARQLELNERTCRCDKPRR

SEQ ID NO: 1094 - protein, 327 aa, Homo sapiens
MTDRQTDTAPSPSYHLLPGRRRTVDAAASRGQGPEPAPGGGVEGVGARGVALKLFVQLLGCSRFGGAVVRAGEAEPSGAARSASSGREEPQPEEGEEEEEKEEERGPQWRLGARKPGSWTGEAAVCADSAPAARAPQALARASGRGGRVARRGAEESGPPHSPSRRGSASRAGPGRASETMNFLLSWVHWSLALLLYLHHAKWSQAAPMAEGGGQNHHEVVKFMDVYQRSYCHPIETLVDIFQEYPDEIEYIFKPSCVPLMRCGGCCNDEGLECVPTEESNITMQIMRIKPHQGQHIGEMSFLQHNKCECRPKKDRARQEKCDKPRR

SEQ ID NO: 1095 - protein, 395 aa, Homo sapiens
MTDRQTDTAPSPSYHLLPGRRRTVDAAASRGQGPEPAPGGGVEGVGARGVALKLFVQLLGCSRFGGAVVRAGEAEPSGAARSASSGREEPQPEEGEEEEEKEEERGPQWRLGARKPGSWTGEAAVCADSAPAARAPQALARASGRGGRVARRGAEESGPPHSPSRRGSASRAGPGRASETMNFLLSWVHWSLALLLYLHHAKWSQAAPMAEGGGQNHHEVVKFMDVYQRSYCHPIETLVDIFQEYPDEIEYIFKPSCVPLMRCGGCCNDEGLECVPTEESNITMQIMRIKPHQGQHIGEMSFLQHNKCECRPKKDRARQEKKSVRGKGKGQKRKRKKSRYKSWSVPCGPCSERRKHLFVQDPQTCKCSCKNTDSRCKARQLELNERTCRCDKPRR

SEQ ID NO: 1096 - protein, 412 aa, Homo sapiens
MTDRQTDTAPSPSYHLLPGRRRTVDAAASRGQGPEPAPGGGVEGVGARGVALKLFVQLLGCSRFGGAVVRAGEAEPSGAARSASSGREEPQPEEGEEEEEKEEERGPQWRLGARKPGSWTGEAAVCADSAPAARAPQALARASGRGGRVARRGAEESGPPHSPSRRGSASRAGPGRASETMNFLLSWVHWSLALLLYLHHAKWSQAAPMAEGGGQNHHEVVKFMDVYQRSYCHPIETLVDIFQEYPDEIEYIFKPSCVPLMRCGGCCNDEGLECVPTEESNITMQIMRIKPHQGQHIGEMSFLQHNKCECRPKKDRARQEKKSVRGKGKGQKRKRKKSRYKSWSVYVGARCCLMPWSLPGPHPCGPCSERRKHLFVQDPQTCKCSCKNTDSRCKARQLELNERTCRCDKPRR

SEQ ID NO: 1097 - protein, 371 aa, Homo sapiens
MTDRQTDTAPSPSYHLLPGRRRTVDAAASRGQGPEPAPGGGVEGVGARGVALKLFVQLLGCSRFGGAVVRAGEAEPSGAARSASSGREEPQPEEGEEEEEKEEERGPQWRLGARKPGSWTGEAAVCADSAPAARAPQALARASGRGGRVARRGAEESGPPHSPSRRGSASRAGPGRASETMNFLLSWVHWSLALLLYLHHAKWSQAAPMAEGGGQNHHEVVKFMDVYQRSYCHPIETLVDIFQEYPDEIEYIFKPSCVPLMRCGGCCNDEGLECVPTEESNITMQIMRIKPHQGQHIGEMSFLQHNKCECRPKKDRARQENPCGPCSERRKHLFVQDPQTCKCSCKNTDSRCKARQLELNERTCRSLTRKD

SEQ ID NO: 1098 - protein, 389 aa, Homo sapiens
MTDRQTDTAPSPSYHLLPGRRRTVDAAASRGQGPEPAPGGGVEGVGARGVALKLFVQLLGCSRFGGAVVRAGEAEPSGAARSASSGREEPQPEEGEEEEEKEEERGPQWRLGARKPGSWTGEAAVCADSAPAARAPQALARASGRGGRVARRGAEESGPPHSPSRRGSASRAGPGRASETMNFLLSWVHWSLALLLYLHHAKWSQAAPMAEGGGQNHHEVVKFMDVYQRSYCHPIETLVDIFQEYPDEIEYIFKPSCVPLMRCGGCCNDEGLECVPTEESNITMQIMRIKPHQGQHIGEMSFLQHNKCECRPKKDRARQEKKSVRGKGKGQKRKRKKSRPCGPCSERRKHLFVQDPQTCKCSCKNTDSRCKARQLELNERTCRCDKPRR

SEQ ID NO: 1099 - protein, 354 aa, Homo sapiens
MTDRQTDTAPSPSYHLLPGRRRTVDAAASRGQGPEPAPGGGVEGVGARGVALKLFVQLLGCSRFGGAVVRAGEAEPSGAARSASSGREEPQPEEGEEEEEKEEERGPQWRLGARKPGSWTGEAAVCADSAPAARAPQALARASGRGGRVARRGAEESGPPHSPSRRGSASRAGPGRASETMNFLLSWVHWSLALLLYLHHAKWSQAAPMAEGGGQNHHEVVKFMDVYQRSYCHPIETLVDIFQEYPDEIEYIFKPSCVPLMRCGGCCNDEGLECVPTEESNITMQIMRIKPHQGQHIGEMSFLQHNKCECRPKKDRARQENPCGPCSERRKHLFVQDPQTCKCSCKNTDSRCKM

SEQ ID NO: 1100 - protein, 317 aa, Homo sapiens
MTDRQTDTAPSPSYHLLPGRRRTVDAAASRGQGPEPAPGGGVEGVGARGVALKLFVQLLGCSRFGGAVVRAGEAEPSGAARSASSGREEPQPEEGEEEEEKEEERGPQWRLGARKPGSWTGEAAVCADSAPAARAPQALARASGRGGRVARRGAEESGPPHSPSRRGSASRAGPGRASETMNFLLSWVHWSLALLLYLHHAKWSQAAPMAEGGGQNHHEVVKFMDVYQRSYCHPIETLVDIFQEYPDEIEYIFKPSCVPLMRCGGCCNDEGLECVPTEESNITMQIMRIKPHQGQHIGEMSFLQHNKCECRCDKPRR

SEQ ID NO: 1101 - protein, 1048 aa, Homo sapiens
MAFPPRRRLRLGPRGLPLLLSGLLLPLCRAFNLDVDSPAEYSGPEGSYFGFAVDFFVPSASSRMFLLVGAPKANTTQPGIVEGGQVLKCDWSSTRRCQPIEFDATGNRDYAKDDPLEFKSHQWFGASVRSKQDKILACAPLYHWRTEMKQEREPVGTCFLQDGTKTVEYAPCRSQDIDADGQGFCQGGFSIDFTKADRVLLGGPGSFYWQGQLISDQVAEIVSKYDPNVYSIKYNNQLATRTAQAIFDDSYLGYSVAVGDFNGDGIDDFVSGVPRAARTLGMVYIYDGKNMSSLYNFTGEQMAAYFGFSVAATDINGDDYADVFIGAPLFMDRGSDGKLQEVGQVSVSLQRASGDFQTTKLNGFEVFARFGSAIAPLGDLDQDGFNDIAIAAPYGGEDKKGIVYIFNGRSTGLNAVPSQILEGQWAARSMPPSFGYSMKGATDIDKNGYPDLIVGAFGVDRAILYRARPVITVNAGLEVYPSILNQDNKTCSLPGTALKVSCFNVRFCLKADGKGVLPRKLNFQVELLLDKLKQKGAIRRALFLYSRSPSHSKNMTISRGGLMQCEELIAYLRDESEFRDKLTPITIFMEYRLDYRTAADTTGLQPILNQFTPANISRQAHILLDCGEDNVCKPKLEVSVDSDQKKIYIGDDNPLTLIVKAQNQGEGAYEAELIVSIPLQADFIGVVRNNEALARLSCAFKTENQTRQVVCDLGNPMKAGTQLLAGLRFSVHQQSEMDTSVKFDLQIQSSNLFDKVSPVVSHKVDLAVLAAVEIRGVSSPDHVFLPIPNWEHKENPETEEDVGPVVQHIYELRNNGPSSFSKAMLHLQWPYKYNNNTLLYILHYDIDGPMNCTSDMEINPLRIKISSLQTTEKNDTVAGQGERDHLITKRDLALSEGDIHTLGCGVAQCLKIVCQVGRLDRGKSAILYVKSLLWTETFMNKENQNHSYSLKSSASFNVIEFPYKNLPIEDITNSTLVTTNVTWGIQPAPMPVPVWVIILAVLAGLLLLAVLVFVMYRMGFFKRVRPPQEEQEREQLQPHENGEGNSET

SEQ ID NO: 1102 - protein, 1012 aa, Homo sapiens
MAFPPRRRLRLGPRGLPLLLSGLLLPLCRAFNLDVDSPAEYSGPEGSYFGFAVDFFVPSASSRMFLLVGAPKANTTQPGIVEGGQVLKCDWSSTRRCQPIEFDATGNRDYAKDDPLEFKSHQWFGASVRSKQDKILACAPLYHWRTEMKQEREPVGTCFLQDGTKTVEYAPCRSRQLISDQVAEIVSKYDPNVYSIKYNNQLATRTAQAIFDDSYLGYSVAVGDFNGDGIDDFVSGVPRAARTLGMVYIYDGKNMSSLYNFTGEQMAAYFGFSVAATDINGDDYADVFIGAPLFMDRGSDGKLQEVGQVSVSLQRASGDFQTTKLNGFEVFARFGSAIAPLGDLDQDGFNDIAIAAPYGGEDKKGIVYIFNGRSTGLNAVPSQILEGQWAARSMPPSFGYSMKGATDIDKNGYPDLIVGAFGVDRAILYRARPVITVNAGLEVYPSILNQDNKTCSLPGTALKVSCFNVRFCLKADGKGVLPRKLNFQVELLLDKLKQKGAIRRALFLYSRSPSHSKNMTISRGGLMQCEELIAYLRDESEFRDKLTPITIFMEYRLDYRTAADTTGLQPILNQFTPANISRQAHILLDCGEDNVCKPKLEVSVDSDQKKIYIGDDNPLTLIVKAQNQGEGAYEAELIVSIPLQADFIGVVRNNEALARLSCAFKTENQTRQVVCDLGNPMKAGTQLLAGLRFSVHQQSEMDTSVKFDLQIQSSNLFDKVSPVVSHKVDLAVLAAVEIRGVSSPDHVFLPIPNWEHKENPETEEDVGPVVQHIYELRNNGPSSFSKAMLHLQWPYKYNNNTLLYILHYDIDGPMNCTSDMEINPLRIKISSLQTTEKNDTVAGQGERDHLITKRDLALSEGDIHTLGCGVAQCLKIVCQVGRLDRGKSAILYVKSLLWTETFMNKENQNHSYSLKSSASFNVIEFPYKNLPIEDITNSTLVTTNVTWGIQPAPMPVPVWVIILAVLAGLLLLAVLVFVMYRMGFFKRVRPPQEEQEREQLQPHENGEGNSET

SEQ ID NO: 1103 - protein, 1002 aa, Homo sapiens
MLLGTLLLILYILMLCRMFLLVGAPKANTTQPGIVEGGQVLKCDWSSTRRCQPIEFDATGNRDYAKDDPLEFKSHQWFGASVRSKQDKILACAPLYHWRTEMKQEREPVGTCFLQDGTKTVEYAPCRSQDIDADGQGFCQGGFSIDFTKADRVLLGGPGSFYWQGQLISDQVAEIVSKYDPNVYSIKYNNQLATRTAQAIFDDSYLGYSVAVGDFNGDGIDDFVSGVPRAARTLGMVYIYDGKNMSSLYNFTGEQMAAYFGFSVAATDINGDDYADVFIGAPLFMDRGSDGKLQEVGQVSVSLQRASGDFQTTKLNGFEVFARFGSAIAPLGDLDQDGFNDIAIAAPYGGEDKKGIVYIFNGRSTGLNAVPSQILEGQWAARSMPPSFGYSMKGATDIDKNGYPDLIVGAFGVDRAILYRARPVITVNAGLEVYPSILNQDNKTCSLPGTALKVSCFNVRFCLKADGKGVLPRKLNFQVELLLDKLKQKGAIRRALFLYSRSPSHSKNMTISRGGLMQCEELIAYLRDESEFRDKLTPITIFMEYRLDYRTAADTTGLQPILNQFTPANISRQAHILLDCGEDNVCKPKLEVSVDSDQKKIYIGDDNPLTLIVKAQNQGEGAYEAELIVSIPLQADFIGVVRNNEALARLSCAFKTENQTRQVVCDLGNPMKAGTQLLAGLRFSVHQQSEMDTSVKFDLQIQSSNLFDKVSPVVSHKVDLAVLAAVEIRGVSSPDHVFLPIPNWEHKENPETEEDVGPVVQHIYELRNNGPSSFSKAMLHLQWPYKYNNNTLLYILHYDIDGPMNCTSDMEINPLRIKISSLQTTEKNDTVAGQGERDHLITKRDLALSEGDIHTLGCGVAQCLKIVCQVGRLDRGKSAILYVKSLLWTETFMNKENQNHSYSLKSSASFNVIEFPYKNLPIEDITNSTLVTTNVTWGIQPAPMPVPVWVIILAVLAGLLLLAVLVFVMYRMGFFKRVRPPQEEQEREQLQPHENGEGNSET

SEQ ID NO: 1104 - protein, 788 aa, Homo sapiens
MRARPRPRPLWATVLALGALAGVGVGGPNICTTRGVSSCQQCLAVSPMCAWCSDEALPLGSPRCDLKENLLKDNCAPESIEFPVSEARVLEDRPLSDKGSGDSSQVTQVSPQRIALRLRPDDSKNFSIQVRQVEDYPVDIYYLMDLSYSMKDDLWSIQNLGTKLATQMRKLTSNLRIGFGAFVDKPVSPYMYISPPEALENPCYDMKTTCLPMFGYKHVLTLTDQVTRFNEEVKKQSVSRNRDAPEGGFDAIMQATVCDEKIGWRNDASHLLVFTTDAKTHIALDGRLAGIVQPNDGQCHVGSDNHYSASTTMDYPSLGLMTEKLSQKNINLIFAVTENVVNLYQNYSELIPGTTVGVLSMDSSNVLQLIVDAYGKIRSKVELEVRDLPEELSLSFNATCLNNEVIPGLKSCMGLKIGDTVSFSIEAKVRGCPQEKEKSFTIKPVGFKDSLIVQVTFDCDCACQAQAEPNSHRCNNGNGTFECGVCRCGPGWLGSQCECSEEDYRPSQQDECSPREGQPVCSQRGECLCGQCVCHSSDFGKITGKYCECDDFSCVRYKGEMCSGHGQCSCGDCLCDSDWTGYYCNCTTRTDTCMSSNGLLCSGRGKCECGSCVCIQPGSYGDTCEKCPTCPDACTFKKECVECKKFDRGALHDENTCNRYCRDEIESVKELKDTGKDAVNCTYKNEDDCVVRFQYYEDSSGKSILYVVEEPECPKGPDILVVLLSVMGAILLIGLAALLIWKLLITIHDRKEFAKFEEERARAKWDTANNPLYKEATSTFTNITYRGT

SEQ ID NO: 1105 - protein, 780 aa, Homo sapiens
MRARPRPRPLWATVLALGALAGVGVGGPNICTTRGVSSCQQCLAVSPMCAWCSDEALPLGSPRCDLKENLLKDNCAPESIEFPVSEARVLEDRPLSDKGSGDSSQVTQVSPQRIALRLRPDDSKNFSIQVRQVEDYPVDIYYLMDLSYSMKDDLWSIQNLGTKLATQMRKLTSNLRIGFGAFVDKPVSPYMYISPPEALENPCYDMKTTCLPMFGYKHVLTLTDQVTRFNEEVKKQSVSRNRDAPEGGFDAIMQATVCDEKIGWRNDASHLLVFTTDAKTHIALDGRLAGIVQPNDGQCHVGSDNHYSASTTMDYPSLGLMTEKLSQKNINLIFAVTENVVNLYQNYSELIPGTTVGVLSMDSSNVLQLIVDAYGKIRSKVELEVRDLPEELSLSFNATCLNNEVIPGLKSCMGLKIGDTVSFSIEAKVRGCPQEKEKSFTIKPVGFKDSLIVQVTFDCDCACQAQAEPNSHRCNNGNGTFECGVCRCGPGWLGSQCECSEEDYRPSQQDECSPREGQPVCSQRGECLCGQCVCHSSDFGKITGKYCECDDFSCVRYKGEMCSGHGQCSCGDCLCDSDWTGYYCNCTTRTDTCMSSNGLLCSGRGKCECGSCVCIQPGSYGDTCEKCPTCPDACTFKKECVECKKFDRGALHDENTCNRYCRDEIESVKELKDTGKDAVNCTYKNEDDCVVRFQYYEDSSGKSILYVVEEPECPKGPDILVVLLSVMGAILLIGLAALLIWKLLITIHDRKEFAKFEEERARAKWDTVRDGAGRFLKSLV

SEQ ID NO: 1106 - protein, 784 aa, Homo sapiens
MRARPRPRPLWATVLALGALAGVGVGGPNICTTRGVSSCQQCLAVSPMCAWCSDEALPLGSPRCDLKENLLKDNCAPESIEFPVSEARVLEDRPLSDKGSGDSSQVTQVSPQRIALRLRPDDSKNFSIQVRQVEDYPVDIYYLMDLSYSMKDDLWSIQNLGTKLATQMRKLTSNLRIGFGAFVDKPVSPYMYISPPEALENPCYDMKTTCLPMFGYKHVLTLTDQVTRFNEEVKKQSVSRNRDAPEGGFDAIMQATVCDEKIGWRNDASHLLVFTTDAKTHIALDGRLAGIVQPNDGQCHVGSDNHYSASTTMDYPSLGLMTEKLSQKNINLIFAVTENVVNLYQNYSELIPGTTVGVLSMDSSNVLQLIVDAYGKIRSKVELEVRDLPEELSLSFNATCLNNEVIPGLKSCMGLKIGDTVSFSIEAKVRGCPQEKEKSFTIKPVGFKDSLIVQVTFDCDCACQAQAEPNSHRCNNGNGTFECGVCRCGPGWLGSQCECSEEDYRPSQQDECSPREGQPVCSQRGECLCGQCVCHSSDFGKITGKYCECDDFSCVRYKGEMCSGHGQCSCGDCLCDSDWTGYYCNCTTRTDTCMSSNGLLCSGRGKCECGSCVCIQPGSYGDTCEKCPTCPDACTFKKECVECKKFDRGALHDENTCNRYCRDEIESVKELKDTGKDAVNCTYKNEDDCVVRFQYYEDSSGKSILYVVEEPECPKGPDILVVLLSVMGAILLIGLAALLIWKLLITIHDRKEFAKFEEERARAKWDTHYAQSLRKWNQPVSIDG

SEQ ID NO: 1107 - protein, 449 aa, Homo sapiens
MGSDVRDLNALLPAVPSLGGGGGCALPVSGAAQWAPVLDFAPPGASAYGSLGGPAPPPAPPPPPPPPPHSFIKQEPSWGGAEPHEEQCLSAFTVHFSGQFTGTAGACRYGPFGPPPPSQASSGQARMFPNAPYLPSCLESQPAIRNQGYSTVTFDGTPSYGHTPSHHAAQFPNHSFKHEDPMGQQGSLGEQQYSVPPPVYGCHTPTDSCTGSQALLLRTPYSSDNLYQMTSQLECMTWNQMNLGATLKGVAAGSSSSVKWTEGQSNHSTGYESDNHTTPILCGAQYRIHTHGVFRGIQDVRRVPGVAPTLVRSASETSEKRPFMCAYPGCNKRYFKLSHLQMHSRKHTGEKPYQCDFKDCERRFSRSDQLKRHQRRHTGVKPFQCKTCQRKFSRSDHLKTHTRTHTGKTSEKPFSCRWPSCQKKFARSDELVRHHNMHQRNMTKLQLAL

SEQ ID NO: 1108 - protein, 429 aa, Homo sapiens
MGSDVRDLNALLPAVPSLGGGGGCALPVSGAAQWAPVLDFAPPGASAYGSLGGPAPPPAPPPPPPPPPHSFIKQEPSWGGAEPHEEQCLSAFTVHFSGQFTGTAGACRYGPFGPPPPSQASSGQARMFPNAPYLPSCLESQPAIRNQGYSTVTFDGTPSYGHTPSHHAAQFPNHSFKHEDPMGQQGSLGEQQYSVPPPVYGCHTPTDSCTGSQALLLRTPYSSDNLYQMTSQLECMTWNQMNLGATLKGHSTGYESDNHTTPILCGAQYRIHTHGVFRGIQDVRRVPGVAPTLVRSASETSEKRPFMCAYPGCNKRYFKLSHLQMHSRKHTGEKPYQCDFKDCERRFSRSDQLKRHQRRHTGVKPFQCKTCQRKFSRSDHLKTHTRTHTGEKPFSCRWPSCQKKFARSDELVRHHNMHQRNMTKLQLAL

SEQ ID NO: 1109 - protein, 432 aa, Homo sapiens
MGSDVRDLNALLPAVPSLGGGGGCALPVSGAAQWAPVLDFAPPGASAYGSLGGPAPPPAPPPPPPPPPHSFIKQEPSWGGAEPHEEQCLSAFTVHFSGQFTGTAGACRYGPFGPPPPSQASSGQARMFPNAPYLPSCLESQPAIRNQGYSTVTFDGTPSYGHTPSHHAAQFPNHSFKHEDPMGQQGSLGEQQYSVPPPVYGCHTPTDSCTGSQALLLRTPYSSDNLYQMTSQLECMTWNQMNLGATLKGHSTGYESDNHTTPILCGAQYRIHTHGVFRGIQDVRRVPGVAPTLVRSASETSEKRPFMCAYPGCNKRYFKLSHLQMHSRKHTGEKPYQCDFKDCERRFSRSDQLKRHQRRHTGVKPFQCKTCQRKFSRSDHLKTHTRTHTGKTSEKPFSCRWPSCQKKFARSDELVRHHNMHQRNMTKLQLAL

SEQ ID NO: 1110 - protein, 446 aa, Homo sapiens
MGSDVRDLNALLPAVPSLGGGGGCALPVSGAAQWAPVLDFAPPGASAYGSLGGPAPPPAPPPPPPPPPHSFIKQEPSWGGAEPHEEQCLSAFTVHFSGQFTGTAGACRYGPFGPPPPSQASSGQARMFPNAPYLPSCLESQPAIRNQGYSTVTFDGTPSYGHTPSHHAAQFPNHSFKHEDPMGQQGSLGEQQYSVPPPVYGCHTPTDSCTGSQALLLRTPYSSDNLYQMTSQLECMTWNQMNLGATLKGVAAGSSSSVKWTEGQSNHSTGYESDNHTTPILCGAQYRIHTHGVFRGIQDVRRVPGVAPTLVRSASETSEKRPFMCAYPGCNKRYFKLSHLQMHSRKHTGEKPYQCDFKDCERRFSRSDQLKRHQRRHTGVKPFQCKTCQRKFSRSDHLKTHTRTHTGEKPFSCRWPSCQKKFARSDELVRHHNMHQRNMTKLQLAL

SEQ ID NO: 1111 - protein, 302 aa, Homo sapiens
MEKGYSTVTFDGTPSYGHTPSHHAAQFPNHSFKHEDPMGQQGSLGEQQYSVPPPVYGCHTPTDSCTGSQALLLRTPYSSDNLYQMTSQLECMTWNQMNLGATLKGVAAGSSSSVKWTEGQSNHSTGYESDNHTTPILCGAQYRIHTHGVFRGIQDVRRVPGVAPTLVRSASETSEKRPFMCAYPGCNKRYFKLSHLQMHSRKHTGEKPYQCDFKDCERRFSRSDQLKRHQRRHTGVKPFQCKTCQRKFSRSDHLKTHTRTHTGEKPFSCRWPSCQKKFARSDELVRHHNMHQRNMTKLQLAL

SEQ ID NO: 1112 - protein, 522 aa, Homo sapiens
MDFLLLQDPASTCVPEPASQHTLRSGPGCLQQPEQQGVRDPGGIWAKLGAAEASAERLQGRRSRGASGSEPQQMGSDVRDLNALLPAVPSLGGGGGCALPVSGAAQWAPVLDFAPPGASAYGSLGGPAPPPAPPPPPPPPPHSFIKQEPSWGGAEPHEEQCLSAFTVHFSGQFTGTAGACRYGPFGPPPPSQASSGQARMFPNAPYLPSCLESQPAIRNQGYSTVTFDGTPSYGHTPSHHAAQFPNHSFKHEDPMGQQGSLGEQQYSVPPPVYGCHTPTDSCTGSQALLLRTPYSSDNLYQMTSQLECMTWNQMNLGATLKGVAAGSSSSVKWTEGQSNHSTGYESDNHTTPILCGAQYRIHTHGVFRGIQDVRRVPGVAPTLVRSASETSEKRPFMCAYPGCNKRYFKLSHLQMHSRKHTGEKPYQCDFKDCERRFSRSDQLKRHQRRHTGVKPFQCKTCQRKFSRSDHLKTHTRTHTGKTSEKPFSCRWPSCQKKFARSDELVRHHNMHQRNMTKLQLAL

SEQ ID NO: 1113 - protein, 505 aa, Homo sapiens
MDFLLLQDPASTCVPEPASQHTLRSGPGCLQQPEQQGVRDPGGIWAKLGAAEASAERLQGRRSRGASGSEPQQMGSDVRDLNALLPAVPSLGGGGGCALPVSGAAQWAPVLDFAPPGASAYGSLGGPAPPPAPPPPPPPPPHSFIKQEPSWGGAEPHEEQCLSAFTVHFSGQFTGTAGACRYGPFGPPPPSQASSGQARMFPNAPYLPSCLESQPAIRNQGYSTVTFDGTPSYGHTPSHHAAQFPNHSFKHEDPMGQQGSLGEQQYSVPPPVYGCHTPTDSCTGSQALLLRTPYSSDNLYQMTSQLECMTWNQMNLGATLKGHSTGYESDNHTTPILCGAQYRIHTHGVFRGIQDVRRVPGVAPTLVRSASETSEKRPFMCAYPGCNKRYFKLSHLQMHSRKHTGEKPYQCDFKDCERRFSRSDQLKRHQRRHTGVKPFQCKTCQRKFSRSDHLKTHTRTHTGKTSEKPFSCRWPSCQKKFARSDELVRHHNMHQRNMTKLQLAL

SEQ ID NO: 1114 - protein, 288 aa, Homo sapiens
MEKGYSTVTFDGTPSYGHTPSHHAAQFPNHSFKHEDPMGQQGSLGEQQYSVPPPVYGCHTPTDSCTGSQALLLRTPYSSDNLYQMTSQLECMTWNQMNLGATLKGHSTGYESDNHTTPILCGAQYRIHTHGVFRGIQDVRRVPGVAPTLVRSASETSEKRPFMCAYPGCNKRYFKLSHLQMHSRKHTGEKPYQCDFKDCERRFSRSDQLKRHQRRHTGVKPFQCKTCQRKFSRSDHLKTHTRTHTGKTSEKPFSCRWPSCQKKFARSDELVRHHNMHQRNMTKLQLAL

SEQ ID NO: 1115 - protein, 219 aa, Homo sapiens
MLRAGAPTGDLPRAGEVHTGTTIMAVEFDGGVVMGSDSRVSAGEAVVNRVFDKLSPLHERIYCALSGSAADAQAVADMAAYQLELHGIELEEPPLVLAAANVVRNISYKYREDLSAHLMVAGWDQREGGQVYGTLGGMLTRQPFAIGGSGSTFIYGYVDAAYKPGMSPEECRRFTTDAIALAMSRDGSSGGVIYLVTITAAGVDHRVILGNELPKFYDE

SEQ ID NO: 1116 - protein, 209 aa, Homo sapiens
MLRAGEVHTGTTIMAVEFDGGVVMGSDSRVSAGEAVVNRVFDKLSPLHERIYCALSGSAADAQAVADMAAYQLELHGIELEEPPLVLAAANVVRNISYKYREDLSAHLMVAGWDQREGGQVYGTLGGMLTRQPFAIGGSGSTFIYGYVDAAYKPGMSPEECRRFTTDAIALAMSRDGSSGGVIYLVTITAAGVDHRVILGNELPKFYDE

SEQ ID NO: 1117 - protein, 158 aa, Homo sapiens
MHQKRTAMFQDPQERPRKLPQLCTELQTTIHDIILECVYCKQQLLRREVYDFAFRDLCIVYRDGNPYAVCDKCLKFYSKISEYRHYCYSLYGTTLEQQYNKPLCDLLIRCINCQKPLCPEEKQRHLDKKQRFHNIRGRWTGRCMSCCRSSRTRRETQL

SEQ ID NO: 1118 - protein, 158 aa, Homo sapiens
MARFEDPTRRPYKLPDLCTELNTSLQDIEITCVYCKTVLELTEVFEFAFKDLFVVYRDSIPHAACHKCIDFYSRIRELRHYSDSVYGDTLEKLTNTGLYNLLIRCLRCQKPLNPAEKLRHLNEKRRFHNIAGHYRGQCHSCCNRARQERLQRRRETQV

SEQ ID NO: 1119 - protein, 98 aa, Homo sapiens
MHGDTPTLHEYMLDLQPETTDLYCYEQLNDSSEEEDEIDGPAGQAEPDRAHYNIVTFCCKCDSTLRLCVQSTHVDIRTLEDLLMGTLGIVCPICSQKP

SEQ ID NO: 1120 - protein, 105 aa, Homo sapiens
MHGPKATLQDIVLHLEPQNEIPVDLLCHEQLSDSEEENDEIDGVNHQHLPARRAEPQRHTMLCMCCKCEARIKLVVESSADDLRAFQQLFLNTLSFVCPWCASQQ

SEQ ID NO: 1121 - protein, 393 aa, Homo sapiens [sequence omitted]

SEQ ID NO: 1122 - protein, 341 aa, Homo sapiens
MEEPQSDPSVEPPLSQETFSDLWKLLPENNVLSPLPSQAMDDLMLSPDDIEQWFTEDPGPDEAPRMPEAAPPVAPAPAAPTPAAPAPAPSWPLSSSVPSQKTYQGSYGFRLGFLHSGTAKSVTCTYSPALNKMFCQLAKTCPVQLWVDSTPPPGTRVRAMAIYKQSQHMTEVVRRCPHHERCSDSDGLAPPQHLIRVEGNLRVEYLDDRNTFRHSVVVPYEPPEVGSDCTTIHYNYMCNSSCMGGMNRRPILTIITLEDSSGNLLGRNSFEVRVCACPGRDRRTEEENLRKKGEPHHELPPGSTKRALPNNTSSSPQPKKKPLDGEYFTLQDQTSFQKENC

SEQ ID NO: 1123 - protein, 346 aa, Homo sapiens
MEEPQSDPSVEPPLSQETFSDLWKLLPENNVLSPLPSQAMDDLMLSPDDIEQWFTEDPGPDEAPRMPEAAPPVAPAPAAPTPAAPAPAPSWPLSSSVPSQKTYQGSYGFRLGFLHSGTAKSVTCTYSPALNKMFCQLAKTCPVQLWVDSTPPPGTRVRAMAIYKQSQHMTEVVRRCPHHERCSDSDGLAPPQHLIRVEGNLRVEYLDDRNTFRHSVVVPYEPPEVGSDCTTIHYNYMCNSSCMGGMNRRPILTIITLEDSSGNLLGRNSFEVRVCACPGRDRRTEEENLRKKGEPHHELPPGSTKRALPNNTSSSPQPKKKPLDGEYFTLQMLLDLRWCYFLINSS

SEQ ID NO: 1124 - protein, 354 aa, Homo sapiens
MDDLMLSPDDIEQWFTEDPGPDEAPRMPEAAPPVAPAPAAPTPAAPAPAPSWPLSSSVPSQKTYQGSYGFRLGFLHSGTAKSVTCTYSPALNKMFCQLAKTCPVQLWVDSTPPPGTRVRAMAIYKQSQHMTEVVRRCPHHERCSDSDGLAPPQHLIRVEGNLRVEYLDDRNTFRHSVVVPYEPPEVGSDCTTIHYNYMCNSSCMGGMNRRPILTIITLEDSSGNLLGRNSFEVRVCACPGRDRRTEEENLRKKGEPHHELPPGSTKRALPNNTSSSPQPKKKPLDGEYFTLQIRGRERFEMFRELNEALELKDAQAGKEPGGSRAHSSHLKSKKGQSTSRHKKLMFKTEGPDSD

SEQ ID NO: 1125 - protein, 302 aa, Homo sapiens
MDDLMLSPDDIEQWFTEDPGPDEAPRMPEAAPPVAPAPAAPTPAAPAPAPSWPLSSSVPSQKTYQGSYGFRLGFLHSGTAKSVTCTYSPALNKMFCQLAKTCPVQLWVDSTPPPGTRVRAMAIYKQSQHMTEVVRRCPHHERCSDSDGLAPPQHLIRVEGNLRVEYLDDRNTFRHSVVVPYEPPEVGSDCTTIHYNYMCNSSCMGGMNRRPILTIITLEDSSGNLLGRNSFEVRVCACPGRDRRTEEENLRKKGEPHHELPPGSTKRALPNNTSSSPQPKKKPLDGEYFTLQDQTSFQKENC

SEQ ID NO: 1126 - protein, 307 aa, Homo sapiens
MDDLMLSPDDIEQWFTEDPGPDEAPRMPEAAPPVAPAPAAPTPAAPAPAPSWPLSSSVPSQKTYQGSYGFRLGFLHSGTAKSVTCTYSPALNKMFCQLAKTCPVQLWVDSTPPPGTRVRAMAIYKQSQHMTEVVRRCPHHERCSDSDGLAPPQHLIRVEGNLRVEYLDDRNTFRHSVVVPYEPPEVGSDCTTIHYNYMCNSSCMGGMNRRPILTIITLEDSSGNLLGRNSFEVRVCACPGRDRRTEEENLRKKGEPHHELPPGSTKRALPNNTSSSPQPKKKPLDGEYFTLQMLLDLRWCYFLINSS

SEQ ID NO: 1127 - protein, 261 aa, Homo sapiens
MFCQLAKTCPVQLWVDSTPPPGTRVRAMAIYKQSQHMTEVVRRCPHHERCSDSDGLAPPQHLIRVEGNLRVEYLDDRNTFRHSVVVPYEPPEVGSDCTTIHYNYMCNSSCMGGMNRRPILTIITLEDSSGNLLGRNSFEVRVCACPGRDRRTEEENLRKKGEPHHELPPGSTKRALPNNTSSSPQPKKKPLDGEYFTLQIRGRERFEMFRELNEALELKDAQAGKEPGGSRAHSSHLKSKKGQSTSRHKKLMFKTEGPDSD

SEQ ID NO: 1128 - protein, 209 aa, Homo sapiens
MFCQLAKTCPVQLWVDSTPPPGTRVRAMAIYKQSQHMTEVVRRCPHHERCSDSDGLAPPQHLIRVEGNLRVEYLDDRNTFRHSVVVPYEPPEVGSDCTTIHYNYMCNSSCMGGMNRRPILTIITLEDSSGNLLGRNSFEVRVCACPGRDRRTEEENLRKKGEPHHELPPGSTKRALPNNTSSSPQPKKKPLDGEYFTLQDQTSFQKENC

SEQ ID NO: 1129 - protein, 214 aa, Homo sapiens
MFCQLAKTCPVQLWVDSTPPPGTRVRAMAIYKQSQHMTEVVRRCPHHERCSDSDGLAPPQHLIRVEGNLRVEYLDDRNTFRHSVVVPYEPPEVGSDCTTIHYNYMCNSSCMGGMNRRPILTIITLEDSSGNLLGRNSFEVRVCACPGRDRRTEEENLRKKGEPHHELPPGSTKRALPNNTSSSPQPKKKPLDGEYFTLQMLLDLRWCYFLINSS

SEQ ID NO: 1130 - protein, 118 aa, Homo sapiens
MPREDAHFIYGYPKKGHGHSYTTAEEAAGIGILTVILGVLLLIGCWYCRRRNGYRALMDKSLHVGTQCALTRRCPQEGFDHRDSKVSLQEKNCEPVVPNAPPAYEKLSAEQSPPPYSP

SEQ ID NO: 1131 - protein, 661 aa, Homo sapiens
MDLVLKRCLLHLAVIGALLAVGATKVPRNQDWLGVSRQLRTKAWNRQLYPEWTEAQRLDCWRGGQVSLKVSNDGPTLIGANASFSIALNFPGSQKVLPDGQVIWVNNTIINGSQVWGGQPVYPQETDDACIFPDGGPCPSGSWSQKRSFVYVWKTWGQYWQVLGGPVSGLSIGTGRAMLGTHTMEVTVYHRRGSRSYVPLAHSSSAFTITDQVPFSVSVSQLRALDGGNKHFLRNQPLTFALQLHDPSGYLAEADLSYTWDFGDSSGTLISRALVVTHTYLEPGPVTAQVVLQAAIPLTSCGSSPVPGTTDGHRPTAEAPNTTAGQVPTTEVVGTTPGQAPTAEPSGTTSVQVPTTEVISTAPVQMPTAESTGMTPEKVPVSEVMGTTLAEMSTPEATGMTPAEVSIVVLSGTTAAQVTTTEWVETTARELPIPEPEGPDASSIMSTESITGSLGPLLDGTATLRLVKRQVPLDCVLYRYGSFSVTLDIVQGIESAEILQAVPSGEGDAFELTVSCQGGLPKEACMEISSPGCQPPAQRLCQPVLPSPACQLVLHQILKGGSGTYCLNVSLADTNSLAVVSTQLIMPGQEAGLGQVPLIVGILLVLMAVVLASLIYRRRLMKQDFSVPQLPHSSSHWLRLPRIFCSCPIGENSPLLSGQQV

SEQ ID NO: 1132 - protein, 668 aa, Homo sapiens
MDLVLKRCLLHLAVIGALLAVGATKVPRNQDWLGVSRQLRTKAWNRQLYPEWTEAQRLDCWRGGQVSLKVSNDGPTLIGANASFSIALNFPGSQKVLPDGQVIWVNNTIINGSQVWGGQPVYPQETDDACIFPDGGPCPSGSWSQKRSFVYVWKTWGQYWQVLGGPVSGLSIGTGRAMLGTHTMEVTVYHRRGSRSYVPLAHSSSAFTITDQVPFSVSVSQLRALDGGNKHFLRNQPLTFALQLHDPSGYLAEADLSYTWDFGDSSGTLISRALVVTHTYLEPGPVTAQVVLQAAIPLTSCGSSPVPGTTDGHRPTAEAPNTTAGQVPTTEVVGTTPGQAPTAEPSGTTSVQVPTTEVISTAPVQMPTAESTGMTPEKVPVSEVMGTTLAEMSTPEATGMTPAEVSIVVLSGTTAAQVTTTEWVETTARELPIPEPEGPDASSIMSTESITGSLGPLLDGTATLRLVKRQVPLDCVLYRYGSFSVTLDIVQGIESAEILQAVPSGEGDAFELTVSCQGGLPKEACMEISSPGCQPPAQRLCQPVLPSPACQLVLHQILKGGSGTYCLNVSLADTNSLAVVSTQLIMPVPGILLTGQEAGLGQVPLIVGILLVLMAVVLASLIYRRRLMKQDFSVPQLPHSSSHWLRLPRIFCSCPIGENSPLLSGQQV

SEQ ID NO: 1133 - protein, 575 aa, Homo sapiens
MDLVLKRCLLHLAVIGALLAVGATKGSQVWGGQPVYPQETDDACIFPDGGPCPSGSWSQKRSFVYVWKTWGQYWQVLGGPVSGLSIGTGRAMLGTHTMEVTVYHRRGSRSYVPLAHSSSAFTITDQVPFSVSVSQLRALDGGNKHFLRNQPLTFALQLHDPSGYLAEADLSYTWDFGDSSGTLISRALVVTHTYLEPGPVTAQVVLQAAIPLTSCGSSPVPGTTDGHRPTAEAPNTTAGQVPTTEVVGTTPGQAPTAEPSGTTSVQVPTTEVISTAPVQMPTAESTGMTPEKVPVSEVMGTTLAEMSTPEATGMTPAEVSIVVLSGTTAAQVTTTEWVETTARELPIPEPEGPDASSIMSTESITGSLGPLLDGTATLRLVKRQVPLDCVLYRYGSFSVTLDIVQGIESAEILQAVPSGEGDAFELTVSCQGGLPKEACMEISSPGCQPPAQRLCQPVLPSPACQLVLHQILKGGSGTYCLNVSLADTNSLAVVSTQLIMPGQEAGLGQVPLIVGILLVLMAVVLASLIYRRRLMKQDFSVPQLPHSSSHWLRLPRIFCSCPIGENSPLLSGQQV

SEQ ID NO: 1134 - protein, 619 aa, Homo sapiens
MDLVLKRCLLHLAVIGALLAVGATKVPRNQDWLGVSRQLRTKAWNRQLYPEWTEAQRLDCWRGGQVSLKVSNDGPTLIGANASFSIALNFPGSQKVLPDGQVIWVNNTIINGSQVWGGQPVYPQETDDACIFPDGGPCPSGSWSQKRSFVYVWKTWGQYWQVLGGPVSGLSIGTGRAMLGTHTMEVTVYHRRGSRSYVPLAHSSSAFTITDQVPFSVSVSQLRALDGGNKHFLRNQPLTFALQLHDPSGYLAEADLSYTWDFGDSSGTLISRALVVTHTYLEPGPVTAQVVLQAAIPLTSCGSSPVPGTTDGHRPTAEAPNTTAGQVPTTEVVGTTPGQAPTAEPSGTTSVQVPTTEVISTAPVQMPTAESTAAQVTTTEWVETTARELPIPEPEGPDASSIMSTESITGSLGPLLDGTATLRLVKRQVPLDCVLYRYGSFSVTLDIVQGIESAEILQAVPSGEGDAFELTVSCQGGLPKEACMEISSPGCQPPAQRLCQPVLPSPACQLVLHQILKGGSGTYCLNVSLADTNSLAVVSTQLIMPGQEAGLGQVPLIVGILLVLMAVVLASLIYRRRLMKQDFSVPQLPHSSSHWLRLPRIFCSCPIGENSPLLSGQQV

SEQ ID NO: 1135 - protein, 626 aa, Homo sapiens
MDLVLKRCLLHLAVIGALLAVGATKVPRNQDWLGVSRQLRTKAWNRQLYPEWTEAQRLDCWRGGQVSLKVSNDGPTLIGANASFSIALNFPGSQKVLPDGQVIWVNNTIINGSQVWGGQPVYPQETDDACIFPDGGPCPSGSWSQKRSFVYVWKTWGQYWQVLGGPVSGLSIGTGRAMLGTHTMEVTVYHRRGSRSYVPLAHSSSAFTITDQVPFSVSVSQLRALDGGNKHFLRNQPLTFALQLHDPSGYLAEADLSYTWDFGDSSGTLISRALVVTHTYLEPGPVTAQVVLQAAIPLTSCGSSPVPGTTDGHRPTAEAPNTTAGQVPTTEVVGTTPGQAPTAEPSGTTSVQVPTTEVISTAPVQMPTAESTAAQVTTTEWVETTARELPIPEPEGPDASSIMSTESITGSLGPLLDGTATLRLVKRQVPLDCVLYRYGSFSVTLDIVQGIESAEILQAVPSGEGDAFELTVSCQGGLPKEACMEISSPGCQPPAQRLCQPVLPSPACQLVLHQILKGGSGTYCLNVSLADTNSLAVVSTQLIMPVPGILLTGQEAGLGQVPLIVGILLVLMAVVLASLIYRRRLMKQDFSVPQLPHSSSHWLRLPRIFCSCPIGENSPLLSGQQV

SEQ ID NO: 1136 - protein, 103 aa, Homo sapiens
MGLVRSVGALAVVAAIFGLEFLMVSQLCEDKHSQCKWVMGSILLLVSFVLSSGGLLGFVILLRNQVTLIGFTLMFWCEFTASFLLFLNAISGLHINSITHPWE

SEQ ID NO: 1137 - protein, 1633 aa, Homo sapiens
MVDPVGFAEAWKAQFPDSEPPRMELRSVGDIEQELERCKASIRRLEQEVNQERFRMIYLQTLLAKEKKSYDRQRWGFRRAAQAPDGASEPRASASRPQPAPADGADPPPAEEPEARPDGEGSPGKARPGTARRPGAAASGERDDRGPPASVAALRSNFERIRKGHGQPGADAEKPFYVNVEFHHERGLVKVNDKEVSDRISSLGSQAMQMERKKSQHGAGSSVGDASRPPYRGRSSESSCGVDGDYEDAELNPRFLKDNLIDANGGSRPPWPPLEYQPYQSIYVGGMMEGEGKGPLLRSQSTSEQEKRLTWPRRSYSPRSFEDCGGGYTPDCSSNENLTSSEEDFSSGQSSRVSPSPTTYRMFRDKSRSPSQNSQQSFDSSSPPTPQCHKRHRHCPVVVSEATIVGVRKTGQIWPNDGEGAFHGDADGSFGTPPGYGCAADRAEEQRRHQDGLPYIDDSPSSSPHLSSKGRGSRDALVSGALESTKASELDLEKGLEMRKWVLSGILASEETYLSHLEALLLPMKPLKAAATTSQPVLTSQQIETIFFKVPELYEIHKEFYDGLFPRVQQWSHQQRVGDLFQKLASQLGVYRVLGYNHNGEWCEAQTKNGQGWVPSNYITPVNSLEKHSWYHGPVSRNAAEYLLSSGINGSFLVRESESSPGQRSISLRYEGRVYHYRINTASDGKLYVSSESRFNTLAELVHHHSTVADGLITTLHYPAPKRNKPTVYGVSPNYDKWEMERTDITMKHKLGGGQYGEVYEGVWKKYSLTVAVKTLKEDTMEVEEFLKEAAVMKEIKHPNLVQLLGVCTREPPFYIITEFMTYGNLLDYLRECNRQEVNAVVLLYMATQISSAMEYLEKKNFIHRDLAARNCLVGENHLVKVADFGLSRLMTGDTYTAHAGAKFPIKWTAPESLAYNKFSIKSDVWAFGVLLWEIATYGMSPYPGIDLSQVYELLEKDYRMERPEGCPEKVYELMRACWQWNPSDRPSFAEIHQAFETMFQESSISDEVEKELGKQGVRGAVSTLLQAPELPTKTRTSRRAAEHRDTTDVPEMPHSKGQGESDPLDHEPAVSPLLPRKERGPPEGGLNEDERLLPKDKKTNLFSALIKKKKKTAPTPPKRSSSFREMDGQPERRGAGEEEGRDISNGALAFTPLDTADPAKSPKPSNGAGVPNGALRESGGSGFRSPHLWKKSSTLTSSRLATGEEEGGGSSSKRFLRSCSASCVPHGAKDTEWRSVTLPRDLQSTGRQFDSSTFGGHKSEKPALPRKRAGENRSDQVTRGTVTPPPRLVKKNEEAADEVFKDIMESSPGSSPPNLTPKPLRRQVTVAPASGLPHKEEAGKGSALGTPAAAEPVTPTSKAGSGAPGGTSKGPAEESRVRRHKHSSESPGRDKGKLSRLKPAPPPPPAASAGKAGGKPSQSPSQEAAGEAVLGAKTKATSLVDAVNSDAAKPSQPGEGLKKPVLPATPKPQSAKPSGTPISPAPVPSTLPSASSALAGDQPSSTAFIPLISTRVSLRKTRQPPERIASGAITKGVVLDSTEALCLAISRNSEQMASHSAVLEAGKNLYTFCVSYVDSIQQMRNKFAFREAINKLENNLRELQICPATAGSGPAATQDFSKLLSSVKEISDIVQR

SEQ ID NO: 1138 - protein, 1790 aa, Homo sapiens [sequence omitted]

SEQ ID NO: 1139 - protein, 1644 aa, Homo sapiens
MVDPVGFAEAWKAQFPDSEPPRMELRSVGDIEQELERCKASIRRLEQEVNQERFRMIYLQTLLAKEKKSYDRQRWGFRRAAQAPDGASEPRASASRPQPAPADGADPPPAEEPEARPDGEGSPGKARPGTARRPGAAASGERDDRGPPASVAALRSNFERIRKGHGQPGADAEKPFYVNVEFHHERGLVKVNDKEVSDRISSLGSQAMQMERKKSQHGAGSSVGDASRPPYRGRSSESSCGVDGDYEDAELNPRFLKDNLIDANGGSRPPWPPLEYQPYQSIYVGGMMEGEGKGPLLRSQSTSEQEKRLTWPRRSYSPRSFEDCGGGYTPDCSSNENLTSSEEDFSSGQSSRVSPSPTTYRMFRDKSRSPSQNSQQSFDSSSPPTPQCHKRHRHCPVVVSEATIVGVRKTGQIWPNDGEGAFHGDADGSFGTPPGYGCAADRAEEQRRHQDGLPYIDDSPSSSPHLSSKGRGSRDALVSGALESTKASELDLEKGLEMRKWVLSGILASEETYLSHLQMLTNSCVKLQTVHSIPLTINKEEALQRPVASDFEPQGLSEAARWNSKENLLAGPSENDPNLFVALYDFVASGDNTLSITKGEKLRVLGYNHNGEWCEAQTKNGQGWVPSNYITPVNSLEKHSWYHGPVSRNAAEYLLSSGINGSFLVRESESSPGQRSISLRYEGRVYHYRINTASDGKLYVSSESRFNTLAELVHHHSTVADGLITTLHYPAPKRNKPTVYGVSPNYDKWEMERTDITMKHKLGGGQYGEVYEGVWKKYSLTVAVKTLKEDTMEVEEFLKEAAVMKEIKHPNLVQLLGVCTREPPFYIITEFMTYGNLLDYLRECNRQEVNAVVLLYMATQISSAMEYLEKKNFIHRDLAARNCLVGENHLVKVADFGLSRLMTGDTYTAHAGAKFPIKWTAPESLAYNKFSIKSDVWAFGVLLWEIATYGMSPYPGIDLSQVYELLEKDYRMERPEGCPEKVYELMRACWQWNPSDRPSFAEIHQAFETMFQESSISDEVEKELGKQGVRGAVSTLLQAPELPTKTRTSRRAAEHRDTTDVPEMPHSKGQGESDPLDHEPAVSPLLPRKERGPPEGGLNEDERLLPKDKKTNLFSALIKKKKKTAPTPPKRSSSFREMDGQPERRGAGEEEGRDISNGALAFTPLDTADPAKSPKPSNGAGVPNGALRESGGSGFRSPHLWKKSSTLTSSRLATGEEEGGGSSSKRFLRSCSASCVPHGAKDTEWRSVTLPRDLQSTGRQFDSSTFGGHKSEKPALPRKRAGENRSDQVTRGTVTPPPRLVKKNEEAADEVFKDIMESSPGSSPPNLTPKPLRRQVTVAPASGLPHKEEAGKGSALGTPAAAEPVTPTSKAGSGAPGGTSKGPAEESRVRRHKHSSESPGRDKGKLSRLKPAPPPPPAASAGKAGGKPSQSPSQEAAGEAVLGAKTKATSLVDAVNSDAAKPSQPGEGLKKPVLPATPKPQSAKPSGTPISPAPVPSTLPSASSALAGDQPSSTAFIPLISTRVSLRKTRQPPERIASGAITKGVVLDSTEALCLAISRNSEQMASHSAVLEAGKNLYTFCVSYVDSIQQMRNKFAFREAINKLENNLRELQICPATAGSGPAATQDFSKLLSSVKEISDIVQR

SEQ ID NO: 1140 - protein, 557 aa, Homo sapiens [sequence omitted]

SEQ ID NO: 1141 - protein, 448 aa, Homo sapiens
QNSQQSFDSSSPPTPQCHKRHRHCPVVVSEATIVGVRKTGQIWPNDGEGAFHGDADGSFGTPPGYGCAADRAEEQRRHQDGLPYIDDSPSSSPHLSSKGRGSRDALVSGALESTKASELDLEKGLEMRKWVLSGILASEETYLSHLEALLLPMKPLKAAATTSQPVLTSQQIETIFFKVPELYEIHKEFYDGLFPRVQQWSHQQRVGDLFQKLASQLGVYRAFVDNYGVAMEMAEKCCQANAQFAEISENLRARSNKDAKDPTTKNSLETLLYKPVDRVTRSTLVLHDLLKHTPASHPDHPLLQDALRISQNFLSSINEEITPRRQSMTVKKGELLNRKDKTTFEKLDYLMSKEDNYKRTREYIRSLKMVPSIPYLEALQRPVASDFEPQGLSEAARWNSKENLLAGPSENDPNLFVALYDFVASGDNTLSITKGEKLRVLGYNHNGE

SEQ ID NO: 1142 - protein, 467 aa, Homo sapiens
MVDPVGFAEAWKAQFPDSEPPRMELRSVGDIEQELERCKASIRRLEQEVNQERFRMIYLQTLLAKEKKSYDRQRWGFRRAAQAPDGASEPRASASRPQPAPADGADPPPAEEPEARPDGEGSPGKARPGTARRPGAAASGERDDRGPPASVAALRSNFERIRKGHGQPGADAEKPFYVNVEFHHERGLVKVNDKEVSDRISSLGSQAMQMERKKSQHGAGSSVGDASRPPYRGRSSESSCGVDGDYEDAELNPRFLKDNLIDANGGSRPPWPPLEYQPYQSIYVGGMMEGEGKGPLLRSQSTSEQEKRLTWPRRSYSPRSFEDCGGGYTPDCSSNENLTSSEEDFSSGQSSRVSPSPTTYRMFRDKSRSPSQNSQQSFDSSSPPTPQCHKRHRHCPVVVSEATIVGVRKTGQIWPNDGEGAFHGDAVLKTEVPHQGVRRARLSLEALGEDPSFLFPASDGPRHSSTW

SEQ ID NO: 1143 - protein, 454 aa, Homo sapiens
MVDPVGFAEAWKAQFPDSEPPRMELRSVGDIEQELERCKASIRRLEQEVNQERFRMIYLQTLLAKEKKSYDRQRWGFRRAAQAPDGASEPRASASRPQPAPADGADPPPAEEPEARPDGEGSPGKARPGTARRPGAAASGERDDRGPPASVAALRSNFERIRKGHGQPGADAEKPFYVNVEFHHERGLVKVNDKEVSDRISSLGSQAMQMERKKSQHGAGSSVGDASRPPYRGRSSESSCGVDGDYEDAELNPRFLKDNLIDANGGSRPPWPPLEYQPYQSIYVGGMMEGEGKGPLLRSQSTSEQEKRLTWPRRSYSPRSFEDCGGGYTPDCSSNENLTSSEEDFSSGQSSRVSPSPTTYRMFRDKSRSPSQNSQQSFDSSSPPTPQCHKRHRHCPVVVSEATIVGVRKTGQIWPNDGEGAFHGDADGSFGTPPGYGCAAGRPPHLTELPVQHQ

SEQ ID NO: 1144 - protein, 458 aa, Homo sapiens
MVDPVGFAEAWKAQFPDSEPPRMELRSVGDIEQELERCKASIRRLEQEVNQERFRMIYLQTLLAKEKKSYDRQRWGFRRAAQAPDGASEPRASASRPQPAPADGADPPPAEEPEARPDGEGSPGKARPGTARRPGAAASGERDDRGPPASVAALRSNFERIRKGHGQPGADAEKPFYVNVEFHHERGLVKVNDKEVSDRISSLGSQAMQMERKKSQHGAGSSVGDASRPPYRGRSSESSCGVDGDYEDAELNPRFLKDNLIDANGGSRPPWPPLEYQPYQSIYVGGMMEGEGKGPLLRSQSTSEQEKRLTWPRRSYSPRSFEDCGGGYTPDCSSNENLTSSEEDFSSGQSSRVSPSPTTYRMFRDKSRSPSQNSQQSFDSSSPPTPQCHKRHRHCPVVVSEATIVGVRKTGQIWPNDGEGAFHGDADGSFGTPPGYCCLCLPAWPSGCTAATARVTRS

SEQ ID NO: 1145 - protein, 441 aa, Homo sapiens
MVDPVGFAEAWKAQFPDSEPPRMELRSVGDIEQELERCKASIRRLEQEVNQERFRMIYLQTLLAKEKKSYDRQRWGFRRAAQAPDGASEPRASASRPQPAPADGADPPPAEEPEARPDGEGSPGKARPGTARRPGAAASGERDDRGPPASVAALRSNFERIRKGHGQPGADAEKPFYVNVEFHHERGLVKVNDKEVSDRISSLGSQAMQMERKKSQHGAGSSVGDASRPPYRGRSSESSCGVDGDYEDAELNPRFLKDNLIDANGGSRPPWPPLEYQPYQSIYVGGMMEGEGKGPLLRSQSTSEQEKRLTWPRRSYSPRSFEDCGGGYTPDCSSNENLTSSEEDFSSGQSSRVSPSPTTYRMFRDKSRSPSQNSQQSFDSSSPPTPQCHKRHRHCPVVVSEATIVGVRKTGQIWPNDGEGAFHGDADGSLELQGKPSRWTQ

SEQ ID NO: 1146 - protein, 513 aa, Homo sapiens
MVDPVGFAEAWKAQFPDSEPPRMELRSVGDIEQELERCKASIRRLEQEVNQERFRMIYLQTLLAKEKKSYDRQRWGFRRAAQAPDGASEPRASASRPQPAPADGADPPPAEEPEARPDGEGSPGKARPGTARRPGAAASGERDDRGPPASVAALRSNFERIRKGHGQPGADAEKPFYVNVEFHHERGLVKVNDKEVSDRISSLGSQAMQMERKKSQHGAGSSVGDASRPPYRGRSSESSCGVDGDYEDAELNPRFLKDNLIDANGGSRPPWPPLEYQPYQSIYVGGMMEGEGKGPLLRSQSTSEQEKRLTWPRRSYSPRSFEDCGGGYTPDCSSNENLTSSEEDFSSGQSSRVSPSPTTYRMFRDKSRSPSQNSQQSFDSSSPPTPQCHKRHRHCPVVVSEATIVGVRKTGQIWPNDGEGAFHGDADGSFGTPPGYGCAADRAEEQRRHQDGLPYIDDSPSSSPHLSSKGRGSRDALVSGALESTKASELDPVKMTPTFSLHCMILWPVEITL

SEQ ID NO: 1147 - protein, 406 aa, Homo sapiens [sequence omitted]

SEQ ID NO: 1148 - protein, 529 aa, Homo sapiens [sequence omitted]

SEQ ID NO: 1149 - protein, 377 aa, Homo sapiens
MLLAVLYCLLWSFQTSAGHFPRACVSSKNLMEKECCPPWSGDRSPCGQLSGRGSCQNILLSNAPLGPQFPFTGVDDRESWPSVFYNRTCQCSGNFMGFNCGNCKFGFWGPNCTERRLLVRRNIFDLSAPEKDKFFAYLTLAKHTISSDYVIPIGTYGQMKNGSTPMFNDINIYDLFVWMHYYVSMDALLGGSEIWRDIDFAHEAPAFLPWHRLFLLRWEQEIQKLTGDENFTIPYWDWRDAEKCDICTDEYMGGQHPTNPNLLSPASFFSSWQIVCSRLEEYNSHQSLCNGTPEGPLRRNPGNHDKSRTPRLPSSADVEFCLSLTQYESGSMDKAANFSFRNTLEEMGFLHVGWAGLKLLTSRDPPPWPPKMLGLQA

SEQ ID NO: 1150 - protein, 142 aa, Homo sapiens
MGAPTLPPAWQPFLKDHRISTFKNWPFLEGCACTPERMAEAGFIHCPTENEPDLAQCFFCFKELEGWEPDDDPIEEHKKHSSGCAFLSVKKQFEELTLGEFLKLDRERAKNKIAKETNNKKKEFEETAKKVRRAIEQLAAMD

SEQ ID NO: 1151 - protein, 165 aa, Homo sapiens
MGAPTLPPAWQPFLKDHRISTFKNWPFLEGCACTPERMAEAGFIHCPTENEPDLAQCFFCFKELEGWEPDDDPIGPGTVAYACNTSTLGGRGGRITREEHKKHSSGCAFLSVKKQFEELTLGEFLKLDRERAKNKIAKETNNKKKEFEETAKKVRRAIEQLAAMD

SEQ ID NO: 1152 - protein, 137 aa, Homo sapiens
MGAPTLPPAWQPFLKDHRISTFKNWPFLEGCACTPERMAEAGFIHCPTENEPDLAQCFFCFKELEGWEPDDDPMQRKPTIRRKNLRKLRRKCAVPSSSWLPWIEASGRSCLVPEWLHHFQGLFPGATSLPVGPLAMS

SEQ ID NO: 1153 - protein, 120 aa, Homo sapiens
MGAPTLPPAWQPFLKDHRISTFKNWPFLEGCACTPERMAEAGFIHCPTENEPDLAQCFFCFKELEGWEPDDDPIEEHKKHSSGCAFLSVKKQFEELTLGEFLKLDRERAKNKIERALLAE

SEQ ID NO: 1154 - protein, 117 aa, Homo sapiens
MGAPTLPPAWQPFLKDHRISTFKNWPFLEGCACTPERMAEAGFIHCPTENEPDLAQCFFCFKELEGWEPDDDPIEEHKKHSSGCAFLSVKKQFEELTLGEFLKLVRETLPPPRSFIR

SEQ ID NO: 1155 - protein, 78 aa, Homo sapiens
MGAPTLPPAWQPFLKDHRISTFKNWPFLEGCACTPERMAEAGFIHCPTENEPDLAQCFFCFKELEGWEPDDDPMRELC

SEQ ID NO: 1156 - protein, 74 aa, Homo sapiens
MGAPTLPPAWQPFLKDHRISTFKNWPFLEGCACTPERMAEAGFIHCPTENEPDLAQCFFCFKELEGWEPDDDPM

SEQ ID NO: 1157 - protein, 261 aa, Homo sapiens
MWVPVVFLTLSVTWIGAAPLILSRIVGGWECEKHSQPWQVLVASRGRAVCGGVLVHPQWVLTAAHCIRNKSVILLGRHSLFHPEDTGQVFQVSHSFPHPLYDMSLLKNRFLRPGDDSSHDLMLLRLSEPAELTDAVKVMDLPTQEPALGTTCYASGWGSIEPEEFLTPKKLQCVDLHVISNDVCAQVHPQKVTKFMLCAGRWTGGKSTCSGDSGGPLVCNGVLQGITSWGSEPCALPERPSLYTKVVHYRKWIKDTIVANP

SEQ ID NO: 1158 - protein, 238 aa, Homo sapiens
MWVPVVFLTLSVTWIGAAPLILSRIVGGWECEKHSQPWQVLVASRGRAVCGGVLVHPQWVLTAAHCIRNKSVILLGRHSLFHPEDTGQVFQVSHSFPHPLYDMSLLKNRFLRPGDDSSHDLMLLRLSEPAELTDAVKVMDLPTQEPALGTTCYASGWGSIEPEEFLTPKKLQCVDLHVISNDVCAQVHPQKVTKFMLCAGRWTGGKSTCSWVILITELTMPALPMVLHGSLVPWRGGV

SEQ ID NO: 1159 - protein, 218 aa, Homo sapiens
MWVPVVFLTLSVTWIGAAPLILSRIVGGWECEKHSQPWQVLVASRGRAVCGGVLVHPQWVLTAAHCIRKPGDDSSHDLMLLRLSEPAELTDAVKVMDLPTQEPALGTTCYASGWGSIEPEEFLTPKKLQCVDLHVISNDVCAQVHPQKVTKFMLCAGRWTGGKSTCSGDSGGPLVCNGVLQGITSWGSEPCALPERPSLYTKVVHYRKWIKDTIVANP

SEQ ID NO: 1160 - protein, 69 aa, Homo sapiens
MWVPVVFLTLSVTWIGAAPLILSRIVGGWECEKHSQPWQVLVASRGRAVCGGVLVHPQWVLTAAHCIRK

SEQ ID NO: 1161 - protein, 227 aa, Homo sapiens
MWVPVVFLTLSVTWIGAAPLILSRIVGGWECEKHSQPWQVLVASRGRAVCGGVLVHPQWVLTAAHCIRNKSVILLGRHSLFHPEDTGQVFQVSHSFPHPLYDMSLLKNRFLRPGDDSSHDLMLLRLSEPAELTDAVKVMDLPTQEPALGTTCYASGWGSIEPEEFLTPKKLQCVDLHVISNDVCAQVHPQKVTKFMLCAGRWTGGKSTCSVSHPYSQDLEGKGEWGP

SEQ ID NO: 1162 - protein, 1132 aa, Homo sapiens
MPRAPRCRAVRSLLRSHYREVLPLATFVRRLGPQGWRLVQRGDPAAFRALVAQCLVCVPWDARPPPAAPSFRQVSCLKELVARVLQRLCERGAKNVLAFGFALLDGARGGPPEAFTTSVRSYLPNTVTDALRGSGAWGLLLRRVGDDVLVHLLARCALFVLVAPSCAYQVCGPPLYQLGAATQARPPPHASGPRRRLGCERAWNHSVREAGVPLGLPAPGARRRGGSASRSLPLPKRPRRGAAPEPERTPVGQGSWAHPGRTRGPSDRGFCVVSPARPAEEATSLEGALSGTRHSHPSVGRQHHAGPPSTSRPPRPWDTPCPPVYAETKHFLYSSGDKEQLRPSFLLSSLRPSLTGARRLVETIFLGSRPWMPGTPRRLPRLPQRYWQMRPLFLELLGNHAQCPYGVLLKTHCPLRAAVTPAAGVCAREKPQGSVAAPEEEDTDPRRLVQLLRQHSSPWQVYGFVRACLRRLVPPGLWGSRHNERRFLRNTKKFISLGKHAKLSLQELTWKMSVRDCAWLRRSPGVGCVPAAEHRLREEILAKFLHWLMSVYVVELLRSFFYVTETTFQKNRLFFYRKSVWSKLQSIGIRQHLKRVQLRELSEAEVRQHREARPALLTSRLRFIPKPDGLRPIVNMDYVVGARTFRREKRAERLTSRVKALFSVLNYERARRPGLLGASVLGLDDIHRAWRTFVLRVRAQDPPPELYFVKVDVTGAYDTIPQDRLTEVIASIIKPQNTYCVRRYAVVQKAAHGHVRKAFKSHVSTLTDLQPYMRQFVAHLQETSPLRDAVVIEQSSSLNEASSGLFDVFLRFMCHHAVRIRGKSYVQCQGIPQGSILSTLLCSLCYGDMENKLFAGIRRDGLLLRLVDDFLLVTPHLTHAKTFLRTLVRGVPEYGCVVNLRKTVVNFPVEDEALGGTAFVQMPAHGLFPWCGLLLDTRTLEVQSDYSSYARTSIRASLTFNRGFKAGRNMRRKLFGVLRLKCHSLFLDLQVNSLQTVCTNIYKILLLQAYRFHACVLQLPFHQQVWKNPTFFLRVISDTASLCYSILKAKNAGMSLGAKGAAGPLPSEAVQWLCHQAFLLKLTRHRVTYVPLLGSLRTAQTQLSRKLPGTTLTALEAAANPALPSDFKTILD

SEQ ID NO: 1163 - protein, 807 aa, Homo sapiens
MPRAPRCRAVRSLLRSHYREVLPLATFVRRLGPQGWRLVQRGDPAAFRALVAQCLVCVPWDARPPPAAPSFRQVSCLKELVARVLQRLCERGAKNVLAFGFALLDGARGGPPEAFTTSVRSYLPNTVTDALRGSGAWGLLLRRVGDDVLVHLLARCALFVLVAPSCAYQVCGPPLYQLGAATQARPPPHASGPRRRLGCERAWNHSVREAGVPLGLPAPGARRRGGSASRSLPLPKRPRRGAAPEPERTPVGQGSWAHPGRTRGPSDRGFCVVSPARPAEEATSLEGALSGTRHSHPSVGRQHHAGPPSTSRPPRPWDTPCPPVYAETKHFLYSSGDKEQLRPSFLLSSLRPSLTGARRLVETIFLGSRPWMPGTPRRLPRLPQRYWQMRPLFLELLGNHAQCPYGVLLKTHCPLRAAVTPAAGVCAREKPQGSVAAPEEEDTDPRRLVQLLRQHSSPWQVYGFVRACLRRLVPPGLWGSRHNERRFLRNTKKFISLGKHAKLSLQELTWKMSVRDCAWLRRSPGVGCVPAAEHRLREEILAKFLHWLMSVYVVELLRSFFYVTETTFQKNRLFFYRKSVWSKLQSIGIRQHLKRVQLRELSEAEVRQHREARPALLTSRLRFIPKPDGLRPIVNMDYVVGARTFRREKRAERLTSRVKALFSVLNYERARRPGLLGASVLGLDDIHRAWRTFVLRVRAQDPPPELYFVKVDVTGAYDTIPQDRLTEVIASIIKPQNTYCVRRYAVVQKAAHGHVRKAFKSHVLRPVPGDPAGLHPLHAALQPVLRRHGEQAVCGDSAGRAAPAFGG

SEQ ID NO: 1164 - protein, 1069 aa, Homo sapiens
MPRAPRCRAVRSLLRSHYREVLPLATFVRRLGPQGWRLVQRGDPAAFRALVAQCLVCVPWDARPPPAAPSFRQVSCLKELVARVLQRLCERGAKNVLAFGFALLDGARGGPPEAFTTSVRSYLPNTVTDALRGSGAWGLLLRRVGDDVLVHLLARCALFVLVAPSCAYQVCGPPLYQLGAATQARPPPHASGPRRRLGCERAWNHSVREAGVPLGLPAPGARRRGGSASRSLPLPKRPRRGAAPEPERTPVGQGSWAHPGRTRGPSDRGFCVVSPARPAEEATSLEGALSGTRHSHPSVGRQHHAGPPSTSRPPRPWDTPCPPVYAETKHFLYSSGDKEQLRPSFLLSSLRPSLTGARRLVETIFLGSRPWMPGTPRRLPRLPQRYWQMRPLFLELLGNHAQCPYGVLLKTHCPLRAAVTPAAGVCAREKPQGSVAAPEEEDTDPRRLVQLLRQHSSPWQVYGFVRACLRRLVPPGLWGSRHNERRFLRNTKKFISLGKHAKLSLQELTWKMSVRDCAWLRRSPGVGCVPAAEHRLREEILAKFLHWLMSVYVVELLRSFFYVTETTFQKNRLFFYRKSVWSKLQSIGIRQHLKRVQLRELSEAEVRQHREARPALLTSRLRFIPKPDGLRPIVNMDYVVGARTFRREKRAERLTSRVKALFSVLNYERARRPGLLGASVLGLDDIHRAWRTFVLRVRAQDPPPELYFVKVDVTGAYDTIPQDRLTEVIASIIKPQNTYCVRRYAVVQKAAHGHVRKAFKSHVSTLTDLQPYMRQFVAHLQETSPLRDAVVIEQSSSLNEASSGLFDVFLRFMCHHAVRIRGKSYVQCQGIPQGSILSTLLCSLCYGDMENKLFAGIRRDGLLLRLVDDFLLVTPHLTHAKTFLSYARTSIRASLTFNRGFKAGRNMRRKLFGVLRLKCHSLFLDLQVNSLQTVCTNIYKILLLQAYRFHACVLQLPFHQQVWKNPTFFLRVISDTASLCYSILKAKNAGMSLGAKGAAGPLPSEAVQWLCHQAFLLKLTRHRVTYVPLLGSLRTAQTQLSRKLPGTTLTALEAAANPALPSDFKTILD

SEQ ID NO: 1165 - protein, 795 aa, Homo sapiens
MPRAPRCRAVRSLLRSHYREVLPLATFVRRLGPQGWRLVQRGDPAAFRALVAQCLVCVPWDARPPPAAPSFRQVSCLKELVARVLQRLCERGAKNVLAFGFALLDGARGGPPEAFTTSVRSYLPNTVTDALRGSGAWGLLLRRVGDDVLVHLLARCALFVLVAPSCAYQVCGPPLYQLGAATQARPPPHASGPRRRLGCERAWNHSVREAGVPLGLPAPGARRRGGSASRSLPLPKRPRRGAAPEPERTPVGQGSWAHPGRTRGPSDRGFCVVSPARPAEEATSLEGALSGTRHSHPSVGRQHHAGPPSTSRPPRPWDTPCPPVYAETKHFLYSSGDKEQLRPSFLLSSLRPSLTGARRLVETIFLGSRPWMPGTPRRLPRLPQRYWQMRPLFLELLGNHAQCPYGVLLKTHCPLRAAVTPAAGVCAREKPQGSVAAPEEEDTDPRRLVQLLRQHSSPWQVYGFVRACLRRLVPPGLWGSRHNERRFLRNTKKFISLGKHAKLSLQELTWKMSVRDCAWLRRSPGVGCVPAAEHRLREEILAKFLHWLMSVYVVELLRSFFYVTETTFQKNRLFFYRKSVWSKLQSIGIRQHLKRVQLRELSEAEVRQHREARPALLTSRLRFIPKPDGLRPIVNMDYVVGARTFRREKRAERLTSRVKALFSVLNYERARRPGLLGASVLGLDDIHRAWRTFVLRVRAQDPPPELYFVKDRLTEVIASIIKPQNTYCVRRYAVVQKAAHGHVRKAFKSHVLRPVPGDPAGLHPLHAALQPVLRRHGEQAVCGDSAGRAAPAFGG

SEQ ID NO: 1166 - protein, 656 aa, Homo sapiens
MASTDYSTYSQAAAQQGYSAYTAQPTQGYAQTTQAYGQQSYGTYGQPTDVSYTQAQTTATYGQTAYATSYGQPPTGYTTPTAPQAYSQPVQGYGTGAYDTTTATVTTTQASYAAQSAYGTQPAYPAYGQQPAATAPTRPQDGNKPTETSQPQSSTGGYNQPSLGYGQSNYSYPQVPGSYPMQPVTAPPSYPPTSYSSTQPTSYDQSSYSQQNTYGQPSSYGQQSSYGQQSSYGQQPPTSYPPQTGSYSQAPSQYSQQSSSYGQQSSFRQDHPSSMGVYGQESGGFSGPGENRSMSGPDNRGRGRGGFDRGGMSRGGRGGGRGGMGSAGERGGFNKPGGPMDEGPDLDLGPPVDPDEDSDNSAIYVQGLNDSVTLDDLADFFKQCGVVKMNKRTGQPMIHIYLDKETGKPKGDATVSYEDPPTAKAAVEWFDGKDFQGSKLKVSLARKKPPMNSMRGGLPPREGRGMPPPLRGGPGGPGGPGGPMGRMGGRGGDRGGFPPRGPRGSRGNPSGGGNVQHRAGDWQCPNPGCGNQNFAWRTECNQCKAPKPEGFLPPPFPPPGGDRGRGGPGGMRGGRGGLMDRGGPGGMFRGGRGGDRGGFRGGRGMDRGGFGGGRRGGPGGPPGPLMEQMGGRRGGRGGPGKMDKGEHRQERRDRPY

SEQ ID NO: 1167 - protein, 583 aa, Homo sapiens
MASTDYSTYSQAAAQQGYSAYTAQPTQGYAQTTQAYGQQSYGTYGQPTDVSYTQAQTTATYGQTAYATSYGQPPTGYTTPTAPQAYSQPVQGYGTGAYDTTTATVTTTQASYAAQSAYGTQPAYPAYGQQPAATAPTRPQDGNKPTETSQPQSSTGGYNQPSLGYGQSNYSYPQVPGSYPMQPVTAPPSYPPTSYSSTQPTSYDQSSYSQQNTYGQPSSYGQQSSYGQQSSYGQQPPTSYPPQTGSYSQAPSQYSQQSSSYGQQSPMDEGPDLDLGPPVDPDEDSDNSAIYVQGLNDSVTLDDLADFFKQCGVVKMNKRTGQPMIHIYLDKETGKPKGDATVSYEDPPTAKAAVEWFDGKDFQGSKLKVSLARKKPPMNSMRGGLPPREGRGMPPPLRGGPGGPGGPGGPMGRMGGRGGDRGGFPPRGPRGSRGNPSGGGNVQHRAGDWQCPNPGCGNQNFAWRTECNQCKAPKPEGFLPPPFPPPGGDRGRGGPGGMRGGRGGLMDRGGPGGMFRGGRGGDRGGFRGGRGMDRGGFGGGRRGGPGGPPGPLMEQMGGRRGGRGGPGKMDKGEHRQERRDRPY

SEQ ID NO: 1168 - protein, 655 aa, Homo sapiens
MASTDYSTYSQAAAQQGYSAYTAQPTQGYAQTTQAYGQQSYGTYGQPTDVSYTQAQTTATYGQTAYATSYGQPPTGYTTPTAPQAYSQPVQGYGTGAYDTTTATVTTTQASYAAQSAYGTQPAYPAYGQQPAATAPTRPQDGNKPTETSQPQSSTGGYNQPSLGYGQSNYSYPQVPGSYPMQPVTAPPSYPPTSYSSTQPTSYDQSSYSQQNTYGQPSSYGQQSSYGQQSSYGQQPPTSYPPQTGSYSQAPSQYSQQSSSYGQQSSFRQDHPSSMGVYGQESGGFSGPGENRSMSGPDNRGRGRGGFDRGGMSRGGRGGGRGGMGAGERGGFNKPGGPMDEGPDLDLGPPVDPDEDSDNSAIYVQGLNDSVTLDDLADFFKQCGVVKMNKRTGQPMIHIYLDKETGKPKGDATVSYEDPPTAKAAVEWFDGKDFQGSKLKVSLARKKPPMNSMRGGLPPREGRGMPPPLRGGPGGPGGPGGPMGRMGGRGGDRGGFPPRGPRGSRGNPSGGGNVQHRAGDWQCPNPGCGNQNFAWRTECNQCKAPKPEGFLPPPFPPPGGDRGRGGPGGMRGGRGGLMDRGGPGGMFRGGRGGDRGGFRGGRGMDRGGFGGGRRGGPGGPPGPLMEQMGGRRGGRGGPGKMDKGEHRQERRDRPY

SEQ ID NO: 1169 - protein, 354 aa, Homo sapiens
MASTDYSTYSQAAAQQGYSAYTAQPTQGYAQTTQAYGQQSYGTYGQPTDVSYTQAQTTATYGQTAYATSYGQPPTGYTTPTAPQAYSQPVQGYGTGAYDTTTATVTTTQASYAAQSAYGTQPAYPAYGQQPAATAPTRPQDGNKPTETSQPQSSTGGYNQPSLGYGQSNYSYPQVPGSYPMQPVTAPPSYPPTSYSSTQPTSYDQSSYSQQNTYGQPSSYGQQSSYGQQSSYGQQPPTSYPPQTGSYSQAPSQYSQQSSSYGQQSSFRQDHPSSMGVYGQESGGFSGPGENRSMSGPDNRGRGRGGFDRGGMSRGGRGGGRGGMGLQSESLVYTSILKKYPYSVLSRQHNEKWD

SEQ ID NO: 1170 - protein, 661 aa, Homo sapiens
MASTDYSTYSQAAAQQGYSAYTAQPTQGYAQTTQAYGQQSYGTYGQPTDVSYTQAQTTATYGQTAYATSYGQPPTVEGTSTGYTTPTAPQAYSQPVQGYGTGAYDTTTATVTTTQASYAAQSAYGTQPAYPAYGQQPAATAPTRPQDGNKPTETSQPQSSTGGYNQPSLGYGQSNYSYPQVPGSYPMQPVTAPPSYPPTSYSSTQPTSYDQSSYSQQNTYGQPSSYGQQSSYGQQSSYGQQPPTSYPPQTGSYSQAPSQYSQQSSSYGQQSSFRQDHPSSMGVYGQESGGFSGPGENRSMSGPDNRGRGRGGFDRGGMSRGGRGGGRGGMGAGERGGFNKPGGPMDEGPDLDLGPPVDPDEDSDNSAIYVQGLNDSVTLDDLADFFKQCGVVKMNKRTGQPMIHIYLDKETGKPKGDATVSYEDPPTAKAAVEWFDGKDFQGSKLKVSLARKKPPMNSMRGGLPPREGRGMPPPLRGGPGGPGGPGGPMGRMGGRGGDRGGFPPRGPRGSRGNPSGGGNVQHRAGDWQCPNPGCGNQNFAWRTECNQCKAPKPEGFLPPPFPPPGGDRGRGGPGGMRGGRGGLMDRGGPGGMFRGGRGGDRGGFRGGRGMDRGGFGGGRRGGPGGPPGPLMEQMGGRRGGRGGPGKMDKGEHRQERRDRPY

SEQ ID NO: 1171 - protein, 600 aa, Homo sapiens
MASTDYSTYSQAAAQQGYSAYTAQPTQGYAQTTQAYGQQSYGTYGQPTDVSYTQAQTTATYGQTAYATSYGQPPTGYTTPTAPQAYSQPVQGYGTGAYDTTTATVTTTQASYAAQSAYGTQPAYPAYGQQPAATAPTSYSSTQPTSYDQSSYSQQNTYGQPSSYGQQSSYGQQSSYGQQPPTSYPPQTGSYSQAPSQYSQQSSSYGQQSSFRQDHPSSMGVYGQESGGFSGPGENRSMSGPDNRGRGRGGFDRGGMSRGGRGGGRGGMGSAGERGGFNKPGGPMDEGPDLDLGPPVDPDEDSDNSAIYVQGLNDSVTLDDLADFFKQCGVVKMNKRTGQPMIHIYLDKETGKPKGDATVSYEDPPTAKAAVEWFDGKDFQGSKLKVSLARKKPPMNSMRGGLPPREGRGMPPPLRGGPGGPGGPGGPMGRMGGRGGDRGGFPPRGPRGSRGNPSGGGNVQHRAGDWQCPNPGCGNQNFAWRTECNQCKAPKPEGFLPPPFPPPGGDRGRGGPGGMRGGRGGLMDRGGPGGMFRGGRGGDRGGFRGGRGMDRGGFGGGRRGGPGGPPGPLMEQMGGRRGGRGGPGKMDKGEHRQERRDRPY

SEQ ID NO: 1172 - protein, 386 aa, Homo sapiens
MRAAPLLLARAASLSLGFLFLLFFWLDRSVLAKELKFVTLVFRHGDRSPIDTFPTDPIKESSWPQGFGQLTQLGMEQHYELGEYIRKRYRKFLNESYKHEQVYIRSTDVDRTLMSAMTNLAALFPPEGVSIWNPILLWQPIPVHTVPLSEDQLLYLPFRNCPRFQELESETLKSEEFQKRLHPYKDFIATLGKLSGLHGQDLFGIWSKVYDPLYCESVHNFTLPSWATEDTMTKLRELSELSLLSLYGIHKQKEKSRLQGGVLVNEILNHMKRATQIPSYKKLIMYSAHDTTVSGLQMALDVYNGLLPPYASCHLTELYFEKGEYFVEMYYRNETQHEPYPLMLPGCSPSCPLERFAELVGPVIPQDWSTECMTTNSHQGTEDSTD

SEQ ID NO: 1173 - protein, 418 aa, Homo sapiens
MRAAPLLLARAASLSLGFLFLLFFWLDRSVLAKELKFVTLVFRHGDRSPIDTFPTDPIKESSWPQGFGQLTQLGMEQHYELGEYIRKRYRKFLNESYKHEQVYIRSTDVDRTLMSAMTNLAALFPPEGVSIWNPILLWQPIPVHTVPLSEDQLLYLPFRNCPRFQELESETLKSEEFQKRLHPYKDFIATLGKLSGLHGQDLFGIWSKVYDPLYCESVHNFTLPSWATEDTMTKLRELSELSLLSLYGIHKQKEKSRLQGGVLVNEILNHMKRATQIPSYKKLIMYSAHDTTVSGLQMALDVYNGLLPPYASCHLTELYFEKGEYFVEMYYRNETQHEPYPLMLPGCSPSCPLERFAELVGPVIPQDWSTECMTTNSHQVLKVIFAVAFCLISAVLMVLLFIHIRRGLCWQRESYGNI

SEQ ID NO: 1174 - protein, 353 aa, Homo sapiens
MRAAPLLLARAASLSLGFLFLLFFWLDRSVLAKELKFVTLVFRHGDRSPIDTFPTDPIKESSWPQGFGQLTQLGMEQHYELGEYIRKRYRKFLNESYKHEQVYIRSTDVDRTLMSAMTNLAALFPPEGVSIWNPILLWQPIPVHTVPLSEDQDFIATLGKLSGLHGQDLFGIWSKVYDPLYCESVHNFTLPSWATEDTMTKLRELSELSLLSLYGIHKQKEKSRLQGGVLVNEILNHMKRATQIPSYKKLIMYSAHDTTVSGLQMALDVYNGLLPPYASCHLTELYFEKGEYFVEMYYRNETQHEPYPLMLPGCSPSCPLERFAELVGPVIPQDWSTECMTTNSHQGTEDSTD

SEQ ID NO: 1175 - protein, 298 aa, Homo sapiens
MGPKDSAKCLHRGPQPSHWAAGDGPTQERCGPRSLGSPVLGLDTCRAWDHVDGQILGQLRPLTEEEEEEGAGATLSRGPAFPGMGSEELRLASFYDWPLTAEVPPELLAAAGFFHTGHQDKVRCFFCYGGLQSWKRGDDPWTEHAKWFPSCQFLLRSKGRDFVHSVQETHSQLLGSWDPWEEPEDAAPVAPSVPASGYPELPTPRREVQSESAQEPGGVSPAEAQRAWWVLEPPGARDVEAQLRRLQEERTCKVCLDRAVSIVFVPCGHLVCAECAPGLQLCPICRAPVRSRVRTFLS

SEQ ID NO: 1176 - protein, 280 aa, Homo sapiens
MGPKDSAKCLHRGPQPSHWAAGDGPTQERCGPRSLGSPVLGLDTCRAWDHVDGQILGQLRPLTEEEEEEGAGATLSRGPAFPGMGSEELRLASFYDWPLTAEVPPELLAAAGFFHTGHQDKVRCFFCYGGLQSWKRGDDPWTEHAKWFPSCQFLLRSKGRDFVHSVQETHSQLLGSWDPWEEPEDAAPVAPSVPASGYPELPTPRREVQSESAQEPGARDVEAQLRRLQEERTCKVCLDRAVSIVFVPCGHLVCAECAPGLQLCPICRAPVRSRVRTFLS

SEQ ID NO: 1177 - protein, 609 aa, Homo sapiens
MKWVESIFLIFLLNFTESRTLHRNEYGIASILDSYQCTAEISLADLATIFFAQFVQEATYKEVSKMVKDALTAIEKPTGDEQSSGCLENQLPAFLEELCHEKEILEKYGHSDCCSQSEEGRHNCFLAHKKPTPASIPLFQVPEPVTSCEAYEEDRETFMNKFIYEIARRHPFLYAPTILLWAARYDKIIPSCCKAENAVECFQTKAATVTKELRESSLLNQHACAVMKNFGTRTFQAITVTKLSQKFTKVNFTEIQKLVLDVAHVHEHCCRGDVLDCLQDGEKIMSYICSQQDTLSNKITECCKLTTLERGQCIIHAENDEKPEGLSPNLNRFLGDRDFNQFSSGEKNIFLASFVHEYSRRHPQLAVSVILRVAKGYQELLEKCFQTENPLECQDKGEEELQKYIQESQALAKRSCGLFQKLGEYYLQNAFLVAYTKKAPQLTSSELMAITRKMAATAATCCQLSEDKLLACGEGAADIIIGHLCIRHEMTPVNPGVGQCCTSSYANRRPCFSSLVVDETYVPPAFSDDKFIFHKDLCQAQGVALQTMKQEFLINLVKQKPQITEEQLEAVIADFSGLLEKCCQGQEQEVCFAEEGQKLISKTRAALGV

SEQ ID NO: 1178 - protein, 486 aa, Homo sapiens
MIQTVPDPAAHIKEALSVVSEDQSLFECAYGTPHLAKTEMTASSSSDYGQTSKMSPRVPQQDWLSQPPARVTIKMECNPSQVNGSRNSPDECSVAKGGKMVGSPDTVGMNYGSYMEEKHMPPPNMTTNERRVIVPADPTLWSTDHVRQWLEWAVKEYGLPDVNILLFQNIDGKELCKMTKDDFQRLTPSYNADILLSHLHYLRETPLPHLTSDDVDKALQNSPRLMHARNTGGAAFIFPNTSVYPEATQRITTRPDLPYEPPRRSAWTGHGHPTPQSKAAQPSPSTVPKTEDQRPQLDPYQILGPTSSRLANPGSGQIQLWQFLLELLSDSSNSSCITWEGTNGEFKMTDPDEVARRWGERKSKPNMNYDKLSRALRYYYDKNIMTKVHGKRYAYKFDFHGIAQALQPHPPESSLYKYPSDLPYMGSYHAHPQKMNFVAPHPPALPVTSSSFFAAPNPYWNSPTGGIYPNTRLPTSHMPSHLGTYY

SEQ ID NO: 1179 - protein, 462 aa, Homo sapiens
MIQTVPDPAAHIKEALSVVSEDQSLFECAYGTPHLAKTEMTASSSSDYGQTSKMSPRVPQQDWLSQPPARVTIKMECNPSQVNGSRNSPDECSVAKGGKMVGSPDTVGMNYGSYMEEKHMPPPNMTTNERRVIVPADPTLWSTDHVRQWLEWAVKEYGLPDVNILLFQNIDGKELCKMTKDDFQRLTPSYNADILLSHLHYLRETPLPHLTSDDVDKALQNSPRLMHARNTDLPYEPPRRSAWTGHGHPTPQSKAAQPSPSTVPKTEDQRPQLDPYQILGPTSSRLANPGSGQIQLWQFLLELLSDSSNSSCITWEGTNGEFKMTDPDEVARRWGERKSKPNMNYDKLSRALRYYYDKNIMTKVHGKRYAYKFDFHGIAQALQPHPPESSLYKYPSDLPYMGSYHAHPQKMNFVAPHPPALPVTSSSFFAAPNPYWNSPTGGIYPNTRLPTSHMPSHLGTYY

SEQ ID NO: 1180 - protein, 363 aa, Homo sapiens
MVGSPDTVGMNYGSYMEEKHMPPPNMTTNERRVIVPADPTLWSTDHVRQWLEWAVKEYGLPDVNILLFQNIDGKELCKMTKDDFQRLTPSYNADILLSHLHYLRETPLPHLTSDDVDKALQNSPRLMHARNTDLPYEPPRRSAWTGHGHPTPQSKAAQPSPSTVPKTEDQRPQLDPYQILGPTSSRLANPGSGQIQLWQFLLELLSDSSNSSCITWEGTNGEFKMTDPDEVARRWGERKSKPNMNYDKLSRALRYYYDKNIMTKVHGKRYAYKFDFHGIAQALQPHPPESSLYKYPSDLPYMGSYHAHPQKMNFVAPHPPALPVTSSSFFAAPNPYWNSPTGGIYPNTRLPTSHMPSHLGTYY

SEQ ID NO: 1181 - protein, 479 aa, Homo sapiens
MASTIKEALSVVSEDQSLFECAYGTPHLAKTEMTASSSSDYGQTSKMSPRVPQQDWLSQPPARVTIKMECNPSQVNGSRNSPDECSVAKGGKMVGSPDTVGMNYGSYMEEKHMPPPNMTTNERRVIVPADPTLWSTDHVRQWLEWAVKEYGLPDVNILLFQNIDGKELCKMTKDDFQRLTPSYNADILLSHLHYLRETPLPHLTSDDVDKALQNSPRLMHARNTGGAAFIFPNTSVYPEATQRITTRPDLPYEPPRRSAWTGHGHPTPQSKAAQPSPSTVPKTEDQRPQLDPYQILGPTSSRLANPGSGQIQLWQFLLELLSDSSNSSCITWEGTNGEFKMTDPDEVARRWGERKSKPNMNYDKLSRALRYYYDKNIMTKVHGKRYAYKFDFHGIAQALQPHPPESSLYKYPSDLPYMGSYHAHPQKMNFVAPHPPALPVTSSSFFAAPNPYWNSPTGGIYPNTRLPTSHMPSHLGTYY

SEQ ID NO: 1182 - protein, 317 aa, Homo sapiens
MIQTVPDPAAHIKEALSVVSEDQSLFECAYGTPHLAKTEMTASSSSDYGQTSKMSPRVPQQDWLSQPPARVTIKMECNPSQVNGSRNSPDECSVAKGGKMVGSPDTVGMNYGSYMEEKHMPPPNMTTNERRVIVPADPTLWSTDHVRQWLEWAVKEYGLPDVNILLFQNIDGKELCKMTKDDFQRLTPSYNADILLSHLHYLRETPLPHLTSDDVDKALQNSPRLMHARNTGGAAFIFPNTSVYPEATQRITTRPDLPYEPPRRSAWTGHGHPTPQSKAAQPSPSTVPKTEDQRPQLDPYQILGPTSSRLANPGWTQ

SEQ ID NO: 1183 - protein, 325 aa, Homo sapiens
MIQTVPDPAAHIKEALSVVSEDQSLFECAYGTPHLAKTEMTASSSSDYGQTSKMSPRVPQQDWLSQPPARVTIKMECNPSQVNGSRNSPDECSVAKGGKMVGSPDTVGMNYGSYMEEKHMPPPNMTTNERRVIVPADPTLWSTDHVRQWLEWAVKEYGLPDVNILLFQNIDGKELCKMTKDDFQRLTPSYNADILLSHLHYLRETPLPHLTSDDVDKALQNSPRLMHARNTGGAAFIFPNTSVYPEATQRITTRPGTKTPLCDLFIERHPRCPAEIRALSHVIQRELIPELKPVPDSLILPLLIWRLNPLKPFHSKTTLKELRAD

SEQ ID NO: 1184 - protein, 10 aa, Homo sapiens
VLPDVFIRCV

SEQ ID NO: 1185 - protein, 479 aa, Homo sapiens
MTTLAGAVPRMMRPGPGQNYPRSGFPLEVSTPLGQGRVNQLGGVFINGRPLPNHIRHKIVEMAHHGIRPCVISRQLRVSHGCVSKILCRYQETGSIRPGAIGGSKPKQVTTPDVEKKIEEYKRENPGMFSWEIRDKLLKDAVCDRNTVPSVSSISRILRSKFGKGEEEEADLERKEAEESEKKAKHSIDGILSERASAPQSDEGSDIDSEPDLPLKRKQRRSRTTFTAEQLEELERAFERTHYPDIYTREELAQRAKLTEARVQVWFSNRRARWRKQAGANQLMAFNHLIPGGFPPTAMPTLPTYQLSETSYQPTSIPQAVSDPSSTVHRPQPLPPSTVHQSTIPSNPDSSSAYCLPSTRHGFSSYTDSFVPPSGPSNPMNPTIGNGLSPQVMGLLTNHGGVPHQPQTDYALSPLTGGLEPTTTVSASCSQRLDHMKSLDSLPTSQSYCPPTYSTTGYSMDPVTGYQYGQYGQSKPWTF

SEQ ID NO: 1186 - protein, 215 aa, Homo sapiens
MTTLAGAVPRMMRPGPGQNYPRSGFPLEVSTPLGQGRVNQLGGVFINGRPLPNHIRHKIVEMAHHGIRPCVISRQLRVSHGCVSKILCRYQETGSIRPGAIGGSKPKQVTTPDVEKKIEEYKRENPGMFSWEIRDKLLKDAVCDRNTVPSVSSISRILRSKFGKGEEEEADLERKEAEESEKKAKHSIDGILSERGKRWRLGRRTCWVTWRASAS

SEQ ID NO: 1187 - protein, 206 aa, Homo sapiens
MTTLAGAVPRMMRPGPGQNYPRSGFPLEVSTPLGQGRVNQLGGVFINGRPLPNHIRHKIVEMAHHGIRPCVISRQLRVSHGCVSKILCRYQETGSIRPGAIGGSKPKQVTTPDVEKKIEEYKRENPGMFSWEIRDKLLKDAVCDRNTVPSVSSISRILRSKFGKGEEEEADLERKEAEESEKKAKHSIDGILSERGKALVSGVSSH

SEQ ID NO: 1188 - protein, 403 aa, Homo sapiens
MTTLAGAVPRMMRPGPGQNYPRSGFPLEVSTPLGQGRVNQLGGVFINGRPLPNHIRHKIVEMAHHGIRPCVISRQLRVSHGCVSKILCRYQETGSIRPGAIGGSKPKQVTTPDVEKKIEEYKRENPGMFSWEIRDKLLKDAVCDRNTVPSVSSISRILRSKFGKGEEEEADLERKEAEESEKKAKHSIDGILSERASAPQSDEGSDIDSEPDLPLKRKQRRSRTTFTAEQLEELERAFERTHYPDIYTREELAQRAKLTEARVQVWFSNRRARWRKQAGANQLMAFNHLIPGGFPPTAMPTLPTYQLSETSYQPTSIPQAVSDPSSTVHRPQPLPPSTVHQSTIPSNPDSSSAYCLPSTRHGFSSYTDSFVPPSGPSNPMNPTIGNGLSPQVPFIISSQISRK

SEQ ID NO: 1189 - protein, 407 aa, Homo sapiens
MTTLAGAVPRMMRPGPGQNYPRSGFPLEVSTPLGQGRVNQLGGVFINGRPLPNHIRHKIVEMAHHGIRPCVISRQLRVSHGCVSKILCRYQETGSIRPGAIGGSKPKQVTTPDVEKKIEEYKRENPGMFSWEIRDKLLKDAVCDRNTVPSVSSISRILRSKFGKGEEEEADLERKEAEESEKKAKHSIDGILSERASAPQSDEGSDIDSEPDLPLKRKQRRSRTTFTAEQLEELERAFERTHYPDIYTREELAQRAKLTEARVQVWFSNRRARWRKQAGANQLMAFNHLIPGGFPPTAMPTLPTYQLSETSYQPTSIPQAVSDPSSTVHRPQPLPPSTVHQSTIPSNPDSSSAYCLPSTRHGFSSYTDSFVPPSGPSNPMNPTIGNGLSPQVPFIISSQISLGFKSF

SEQ ID NO: 1190 - protein, 483 aa, Homo sapiens
MTTLAGAVPRMMRPGPGQNYPRSGFPLEVSTPLGQGRVNQLGGVFINGRPLPNHIRHKIVEMAHHGIRPCVISRQLRVSHGCVSKILCRYQETGSIRPGAIGGSKPKVTTPDVEKKIEEYKRENPGMFSWEIRDKLLKDAVCDRNTVPSVSSISRILRSKFGKGEEEEADLERKEAEESEKKAKHSIDGILSERASAPQSDEGSDIDSEPDLPLKRKQRRSRTTFTAEQLEELERAFERTHYPDIYTREELAQRAKLTEARVQVWFSNRRARWRKQAGANQLMAFNHLIPGGFPPTAMPTLPTYQLSETSYQPTSIPQAVSDPSSTVHRPQPLPPSTVHQSTIPSNPDSSSAYCLPSTRHGFSSYTDSFVPPSGPSNPMNPTIGNGLSPQVMGLLTNHGGVPHQPQTDYALSPLTGGLEPTTTVSASCSQRLDHMKSLDSLPTSQSYCPPTYSTTGYSMDPVTGYQYGQYGQSAFHYLKPDIA

SEQ ID NO: 1191 - protein, 484 aa, Homo sapiens
MTTLAGAVPRMMRPGPGQNYPRSGFPLEVSTPLGQGRVNQLGGVFINGRPLPNHIRHKIVEMAHHGIRPCVISRQLRVSHGCVSKILCRYQETGSIRPGAIGGSKPKQVTTPDVEKKIEEYKRENPGMFSWEIRDKLLKDAVCDRNTVPSVSSISRILRSKFGKGEEEEADLERKEAEESEKKAKHSIDGILSERASAPQSDEGSDIDSEPDLPLKRKQRRSRTTFTAEQLEELERAFERTHYPDIYTREELAQRAKLTEARVQVWFSNRRARWRKQAGANQLMAFNHLIPGGFPPTAMPTLPTYQLSETSYQPTSIPQAVSDPSSTVHRPQPLPPSTVHQSTIPSNPDSSSAYCLPSTRHGFSSYTDSFVPPSGPSNPMNPTIGNGLSPQVMGLLTNHGGVPHQPQTDYALSPLTGGLEPTTTVSASCSQRLDHMKSLDSLPTSQSYCPPTYSTTGYSMDPVTGYQYGQYGQSAFHYLKPDIA

SEQ ID NO: 1192 - protein, 505 aa, Homo sapiens
MTTLAGAVPRMMRPGPGQNYPRSGFPLEVSTPLGQGRVNQLGGVFINGRPLPNHIRHKIVEMAHHGIRPCVISRQLRVSHGCVSKILCRYQETGSIRPGAIGGSKPKQVTTPDVEKKIEEYKRENPGMFSWEIRDKLLKDAVCDRNTVPSVSSISRILRSKFGKGEEEEADLERKEAEESEKKAKHSIDGILSERASAPQSDEGSDIDSEPDLPLKRKQRRSRTTFTAEQLEELERAFERTHYPDIYTREELAQRAKLTEARVQVWFSNRRARWRKQAGANQLMAFNHLIPGGFPPTAMPTLPTYQLSETSYQPTSIPQAVSDPSSTVHRPQPLPPSTVHQSTIPSNPDSSSAYCLPSTRHGFSSYTDSFVPPSGPSNPMNPTIGNGLSPQVMGLLTNHGGVPHQPQTDYALSPLTGGLEPTTTVSASCSQRLDHMKSLDSLPTSQSYCPPTYSTTGYSMDPVTGYQYGQYGQSAFHYLKPDIAWFQILLNTFDKSSGEEEDLEQ

SEQ ID NO: 1193 - protein, 1620 aa, Homo sapiens
MGAIGLLWLLPLLLSTAAVGSGMGTGQRAGSPAAGPPLQPREPLSYSRLQRKSLAVDFVVPSLFRVYARDLLLPPSSSELKAGRPEARGSLALDCAPLLRLLGPAPGVSWTAGSPAPAEARTLSRVLKGGSVRKLRRAKQLVLELGEEAILEGCVGPPGEAAVGLLQFNLSELFSWWIRQGEGRLRIRLMPEKKASEVGREGRLSAAIRASQPRLLFQIFGTGHSSLESPTNMPSPSPDYFTWNLTWIMKDSFPFLSHRSRYGLECSFDFPCELEYSPPLHDLRNQSWSWRRIPSEEASQMDLLDGPGAERSKEMPRGSFLLLNTSADSKHTILSPWMRSSSEHCTLAVSVHRHLQPSGRYIAQLLPHNEAAREILLMPTPGKHGWTVLQGRIGRPDNPFRVALEYISSGNRSLSAVDFFALKNCSEGTSPGSKMALQSSFTCWNGTVLQLGQACDFHQDCAQGEDESQMCRKLPVGFYCNFEDGFCGWTQGTLSPHTPQWQVRTLKDARFQDHQDHALLLSTTDVPASESATVTSATFPAPIKSSPCELRMSWLIRGVLRGNVSLVLVENKTGKEQGRMVWHVAAYEGLSLWQWMVLPLLDVSDRFWLQMVAWWGQGSRAIVAFDNISISLDCYLTISGEDKILQNTAPKSRNLFERNPNKELKPGENSPRQTPIFDPTVHWLFTTCGASGPHGPTQAQCNNAYQNSNLSVEVGSEGPLKGIQIWKVPATDTYSISGYGAAGGKGGKNTMMRSHGVSVLGIFNLEKDDMLYILVGQQGEDACPSTNQLIQKVCIGENNVIEEEIRVNRSVHEWAGGGGGGGGATYVFKMKDGVPVPLIIAAGGGGRAYGAKTDTFHPERLENNSSVLGLNGNSGAAGGGGGWNDNTSLLWAGKSLQEGATGGHSCPQAMKKWGWETRGGFGGGGGGCSSGGGGGGYIGGNAASNNDPEMDGEDGVSFISPLGILYTPALKVMEGHGEVNIKHYLNCSHCEVDECHMDPESHKVICFCDHGTVLAEDGVSCIVSPTPEPHLPLSLILSVVTSALVAALVLAFSGIMIVYRRKHQELQAMQMELQSPEYKLSKLRTSTIMTDYNPNYCFAGKTSSISDLKEVPRKNITLIRGLGHGAFGEVYEGQVSGMPNDPSPLQVAVKTLPEVCSEQDELDFLMEALIISKFNHQNIVRCIGVSLQSLPRFILLELMAGGDLKSFLRETRPRPSQPSSLAMLDLLHVARDIACGCQYLEENHFIHRDIAARNCLLTCPGPGRVAKIGDFGMARDIYRASYYRKGGCAMLPVKWMPPEAFMEGIFTSKTDTWSFGVLLWEIFSLGYMPYPSKSNQEVLEFVTSGGRMDPPKNCPGPVYRIMTQCWQHQPEDRPNFAIILERIEYCTQDPDVINTALPIEYGPLVEEEEKVPVRPKDPEGVPPLLVSQQAKREEERSPAAPPPLPTTSSGKAAKKPTAAEISVRVPRGPAVEGGHVNMAFSQSNPPSELHKVHGSRNKPTSLWNPTYGSWFTEKPTKKNNPIAKKEPHDRGNLGLEGSCTVPPNVATGRLPGASLLLEPSSLTANMKEVPLFRLRHFPCGNVNYGYQQQGLPLEAATAPGAGHYEDTILKSKNSMNQPGP

SEQ ID NO: 1194 - protein, 920 aa, Homo sapiens
MEVQLGLGRVYPRPPSKTYRGAFQNLFQSVREVIQNPGPRHPEAASAAPPGASLLLLQQQQQQQQQQQQQQQQQQQQQQQETSPRQQQQQQGEDGSPQAHRRGPTGYLVLDEEQQPSQPQSALECHPERGCVPEPGAAVAASKGLPQQLPAPPDEDDSAAPSTLSLLGPTFPGLSSCSADLKDILSEASTMQLLQQQQQEAVSEGSSSGRAREASGAPTSSKDNYLGGTSTISDNAKELCKAVSVSMGLGVEALEHLSPGEQLRGDCMYAPLLGVPPAVRPTPCAPLAECKGSLLDDSAGKSTEDTAEYSPFKGGYTKGLEGESLGCSGSAAAGSSGTLELPSTLSLYKSGALDEAAAYQSRDYYNFPLALAGPPPPPPPPHPHARIKLENPLDYGSAWAAAAAQCRYGDLASLHGAGAAGPGSGSPSAAASSSWHTLFTAEEGQLYGPCGGGGGGGGGGGGGGGGGGGGGGGEAGAVAPYGYTRPPQGLAGQESDFTAPDVWYPGGMVSRVPYPSPTCVKSEMGPWMDSYSGPYGDMRLETARDHVLPIDYYFPPQKTCLICGDEASGCHYGALTCGSCKVFFKRAAEGKQKYLCASRNDCTIDKFRRKNCPSCRLRKCYEAGMTLGARKLKKLGNLKLQEEGEASSTTSPTEETTQKLTVSHIEGYECQPIFLNVLEAIEPGVVCAGHDNNQPDSFAALLSSLNELGERQLVHVVKWAKALPGFRNLHVDDQMAVIQYSWMGLMVFAMGWRSFTNVNSRMLYFAPDLVFNEYRMHKSRMYSQCVRMRHLSQEFGWLQITPQEFLCMKALLLFSIIPVDGLKNQKFFDELRMNYIKELDRIIACKRKNPTSCSRRFYQLTKLLDSVQPIARELHQFTFDLLIKSHMVSVDFPEMMAEIISVQVPKILSGKVKPIYFHTQ

SEQ ID NO: 1195 - protein, 388 aa, Homo sapiens
MILWLHSLETARDHVLPIDYYFPPQKTCLICGDEASGCHYGALTCGSCKVFFKRAAEGKQKYLCASRNDCTIDKFRRKNCPSCRLRKCYEAGMTLGARKLKKLGNLKLQEEGEASSTTSPTEETTQKLTVSHIEGYECQPIFLNVLEAIEPGVVCAGHDNNQPDSFAALLSSLNELGERQLVHVVKWAKALPGFRNLHVDDQMAVIQYSWMGLMVFAMGWRSFTNVNSRMLYFAPDLVFNEYRMHKSRMYSQCVRMRHLSQEFGWLQITPQEFLCMKALLLFSIIPVDGLKNQKFFDELRMNYIKELDRIIACKRKNPTSCSRRFYQLTKLLDSVQPIARELHQFTFDLLIKSHMVSVDFPEMMAEIISVQVPKILSGKVKPIYFHTQ

SEQ ID NO: 1196 - protein, 644 aa, Homo sapiens
MEVQLGLGRVYPRPPSKTYRGAFQNLFQSVREVIQNPGPRHPEAASAAPPGASLLLLQQQQQQQQQQQQQQQQQQQQQQQETSPRQQQQQQGEDGSPQAHRRGPTGYLVLDEEQQPSQPQSALECHPERGCVPEPGAAVAASKGLPQQLPAPPDEDDSAAPSTLSLLGPTFPGLSSCSADLKDILSEASTMQLLQQQQQEAVSEGSSSGRAREASGAPTSSKDNYLGGTSTISDNAKELCKAVSVSMGLGVEALEHLSPGEQLRGDCMYAPLLGVPPAVRPTPCAPLAECKGSLLDDSAGKSTEDTAEYSPFKGGYTKGLEGESLGCSGSAAAGSSGTLELPSTLSLYKSGALDEAAAYQSRDYYNFPLALAGPPPPPPPPHPHARIKLENPLDYGSAWAAAAAQCRYGDLASLHGAGAAGPGSGSPSAAASSSWHTLFTAEEGQLYGPCGGGGGGGGGGGGGGGGGGGGGGGEAGAVAPYGYTRPPQGLAGQESDFTAPDVWYPGGMVSRVPYPSPTCVKSEMGPWMDSYSGPYGDMRLETARDHVLPIDYYFPPQKTCLICGDEASGCHYGALTCGSCKVFFKRAAEGKQKYLCASRNDCTIDKFRRKNCPSCRLRKCYEAGMTLGEKFRVGNCKHLKMTRP

SEQ ID NO: 1197 - protein, 648 aa, Homo sapiens
MEVQLGLGRVYPRPPSKTYRGAFQNLFQSVREVIQNPGPRHPEAASAAPPGASLLLLQQQQQQQQQQQQQQQQQQQQQQQETSPRQQQQQQGEDGSPQAHRRGPTGYLVLDEEQQPSQPQSALECHPERGCVPEPGAAVAASKGLPQQLPAPPDEDDSAAPSTLSLLGPTFPGLSSCSADLKDILSEASTMQLLQQQQQEAVSEGSSSGRAREASGAPTSSKDNYLGGTSTISDNAKELCKAVSVSMGLGVEALEHLSPGEQLRGDCMYAPLLGVPPAVRPTPCAPLAECKGSLLDDSAGKSTEDTAEYSPFKGGYTKGLEGESLGCSGSAAAGSSGTLELPSTLSLYKSGALDEAAAYQSRDYYNFPLALAGPPPPPPPPHPHARIKLENPLDYGSAWAAAAAQCRYGDLASLHGAGAAGPGSGSPSAAASSSWHTLFTAEEGQLYGPCGGGGGGGGGGGGGGGGGGGGGGGEAGAVAPYGYTRPPQGLAGQESDFTAPDVWYPGGMVSRVPYPSPTCVKSEMGPWMDSYSGPYGDMRLETARDHVLPIDYYFPPQKTCLICGDEASGCHYGALTCGSCKVFFKRAAEGKQKYLCASRNDCTIDKFRRKNCPSCRLRKCYEAGMTLGAAVVVSERILRVFGVSEWLP

SEQ ID NO: 1198 - protein, 433 aa, Homo sapiens
MALRVTRNSKINAENKAKINMAGAKRVPTAPAATSKPGLRPRTALGDIGNKVSEQLQAKMPMKKEAKPSATGKVIDKKLPKPLEKVPMLVPVPVSEPVPEPEPEPEPEPVKEEKLSPEPILVDTASPSPMETSGCAPAEEDLCQAFSDVILAVNDVDAEDGADPNLCSEYVKDIYAYLRQLEEEQAVRPKYLLGREVTGNMRAILIDWLVQVQMKFRLLQETMYMTVSIIDRFMQNNCVPKKMLQLVGVTAMFIASKYEEMYPPEIGDFAFVTDNTYTKHQIRQMEMKILRALNFGLGRPLPLHFLRRASKIGEVDVEQHTLAKYLMELTMLDYDMVHFPPSQIAAGAFCLALKILDNGEWTPTLQHYLSYTEESLLPVMQHLAKNVVMVNQGLTKHMTVKNKYATSKHAKISTLPQLNSALVQDLAKAVAKV

SEQ ID NO: 1199 - protein, 396 aa, Homo sapiens
MALRVTRNSKINAENKAKINMAGAKRVPTAPAATSKPGLRPRTALGDIGNKVSEQLQAKMPMKKEAKPSATGKVIDKKLPKPLEKVPMLVPVPVSEPVPEPEPEPEPEPVKEEKLSPEPILVDTASPSPMETSGCAPAEEDLCQAFSDVILAVNDVDAEDGADPNLCSEYVKDIYAYLRQLEEEQAVRPKYLLGREVTGNMRAILIDWLVQVQMKFRLLQETMYMTVSIIDRFMQNNCVPKKMLQLVGVTAMFIASKYEEMYPPEIGDFAFVTDNTYTKHQIRQMEMKILRALNFGLGRPLPLHFLRRASKIGEVDVEQHTLAKYLMELTMLDYDMVHFPPSQIAAGAFCLALKILDNGEWTVKNKYATSKHAKISTLPQLNSALVQDLAKAVAKV

SEQ ID NO: 1200 - protein, 464 aa, Homo sapiens
MPSCSTSTMPGMICKNPDLEFDSLQPCFYPDEDDFYFGGPDSTPPGEDIWKKFELLPTPPLSPSRGFAEHSSEPPSWVTEMLLENELWGSPAEEDAFGLGGLGGLTPNPVILQDCMWSGFSAREKLERAVSEKLQHGRGPPTAGSTAQSPGAGAASPAGRGHGGAAGAGRAGAALPAELAHPAAECVDPAVVFPFPVNKREPAPVPAAPASAPAAGPAVASGAGIAAPAGAPGVAPPRPGGRQTSGGDHKALSTSGEDTLSDSDDEDDEEEDEEEEIDVVTVEKRRSSSNTKAVTTFTITVRPKNAALGPGRAQSSELILKRCLPIHQQHNYAAPSPYVESEDAPPQKKIKSEASPRPLKSVIPPKAKSLSPRNSDSEDSERRRNHNILERQRRNDLRSSFLTLRDHVPELVKNEKAAKVVILKKATEYVHSLQAEEHQLLLEKEKLQARQQQLLKKIEHARTC

SEQ ID NO: 1201 - protein, 193 aa, Homo sapiens
MAAIRKKLVIVGDGACGKTCLLIVFSKDQFPEVYVPTVFENYIADIEVDGKQVELALWDTAGQEDYDRLRPLSYPDTDVILMCFSIDSPDSLENIPEKWTPEVKHFCPNVPIILVGNKKDLRQDEHTRRELAKMKQEPVRSEEGRDMANRISAFGYLECSAKTKEGVREVFEMATRAGLQVRKNKRRRGCPIL

SEQ ID NO: 1202 - protein, 237 aa, Homo sapiens [sequence omitted]

SEQ ID NO: 1203 - protein, 126 aa, Homo sapiens
VLHSFTDAIFDEWMKRFNPPADAWPQELAPIGHNRMYNMVPFFPPVTNEELFLTSDQLGYSYAIDLPVSVEETPGWPTTLLVVMGTLVALVGLFVLLAFLQYRRLRKGYTPLMETHLSSKRYTEEA

SEQ ID NO: 1204 - protein, 84 aa, Homo sapiens
VLHSFTDAIFDEWMKRFNPPADAWPQELAPIGHNRMYNMVPFFPPVTNEELFLTSDQLGYSYAIDLPDFQANFICSYLVSVHQE

SEQ ID NO: 1205 - protein, 123 aa, Homo sapiens
MKAVLLALLMAGLALQPGTALLCYSCKAQVSNEDCLQVENCTQLGEQCWTARIRAVGLLTVISKGCSLNCVDDSQDYYVGKKNITCCDTDLCNASGAHALQPAAAILALLPALGLLLWGPGQL

SEQ ID NO: 1206 - protein, 309 aa, Homo sapiens
MSLEQRSLHCKPEEALEAQQEALGLVCVQAATSSSSPLVLGTLEEVPTAGSTDPPQSPQGASAFPTTINFTRQRQPSEGSSSREEEGPSTSCILESLFRAVITKKVADLVGFLLLKYRAREPVTKAEMLESVIKNYKHCFPEIFGKASESLQLVFGIDVKEADPTGHSYVLVTCLGLSYDGLLGDNQIMPKTGFLIIVLVMIAMEGGHAPEEEIWEELSVMEVYDGREHSAYGEPRKLLTQDLVQEKYLEYRQVPDSDPARYEFLWGPRALAETSYVKVLEYVIKVSARVRFFFPSLREAALREEEEGV

SEQ ID NO: 1207 - protein, 543 aa, Homo sapiens
MGTSLSPNDPWPLNPLSIQQTTLLLLLSVLATVHVGQRLLRQRRRQLRSAPPGPFAWPLIGNAAAVGQAAHLSFARLARRYGDVFQIRLGSCPIVVLNGERAIHQALVQQGSAFADRPAFASFRVVSGGRSMAFGHYSEHWKVQRRAAHSMMRNFFTRQPRSRQVLEGHVLSEARELVALLVRGSADGAFLDPRPLTVVAVANVMSAVCFGCRYSHDDPEFRELLSHNEEFGRTVGAGSLVDVMPWLQYFPNPVRTVFREFEQLNRNFSNFILDKFLRHCESLRPGAAPRDMMDAFILSAEKKAAGDSHGGGARLDLENVPATITDIFGASQDTLSTALQWLLLLFTRYPDVQTRVQAELDQVVGRDRLPCMGDQPNLPYVLAFLYEAMRFSSFVPVTIPHATTANTSVLGYHIPKDTVVFVNQWSVNHDPLKWPNPENFDPARFLDKDGLINKDLTSRVMIFSVGKRRCIGEELSKMQLFLFISILAHQCDFRANPNEPAKMNFSYGLTIKPKSFKVNVTLRESMELLDSAVQNLQAKETCQ

SEQ ID NO: 1208 - protein, 663 aa, Homo sapiens
MAATEISVLSEQFTKIKELELMPEKGLKEEEKDGVCREKDHRSPSELEAERTSGAFQDSVLEEEVELVLAPSEESEKYILTLQTVHFTSEAVELQDMSLLSIQQQEGVQVVVQQPGPGLLWLEEGPRQSLQQCVAISIQQELYSPQEMEVLQFHALEENVMVASEDSKLAVSLAETTGLIKLEEEQEKNQLLAERTKEQLFFVETMSGDERSDEIVLTVSNSNVEEQEDQPTAGQADAEKAKSTKNQRKTKGAKGTFHCDVCMFTSSRMSSFNRHMKTHTSEKPHLCHLCLKTFRTVTLLRNHVNTHTGTRPYKCNDCNMAFVTSGELVRHRRYKHTHEKPFKCSMCKYASVEASKLKRHVRSHTGERPFQCCQCSYASRDTYKLKRHMRTHSGEKPYECHICHTRFTQSGTMKIHILQKHGENVPKYQCPHCATIIARKSDLRVHMRNLHAYSAAELKCRYCSAVFHERYALIQHQKTHKNEKRFKCKHCSYACKQERHMTAHIRTHTGEKPFTCLSCNKCFRQKQLLNAHFRKYHDANFIPTVYKCSKCGKGFSRWINLHRHSEKCGSGEAKSAASGKGRRTRKRKQTILKEATKGQKEAAKGWKEAANGDEAAAEEASTTKGEQFPGEMFPVACRETTARVKEEVDEGVTCEMLLNTMDK

SEQ ID NO: 1209 - protein, 573 aa, Homo sapiens
MAATEISVLSEQFTKIKELELMPEKGLKEEEKDGVCREKDHRSPSELEAERTSGAFQDSVLEEEVELVLAPSEESEKYILTLQTVHFTSEAVELQDMSLLSIQQQEGVQVVVQQPGPGLLWLEEGPRQSLQQCVAISIQQELYSPQEMEVLQFHALEENVMVASEDSKLAVSLAETTGLIKLEEEQEKNQLLAERTKEQLFFVETMSGDERSDEIVLTVSNSNVEEQEDQPTAGQADAEKAKSTKNQRKTKGAKGTFHCDVCMFTSSRMSSFNRHMKTHTSEKPHLCHLCLKTFRTVTLLRNHVNTHTGTRPYKCNDCNMAFVTSGELVRHRRYKHTHEKPFKCSMCKYASVEASKLKRHVRSHTGERPFQCCQCSYASRDTYKLKRHMRTHSGEKPYECHICHTRFTQSGTMKIHILQKHGENVPKYQCPHCATIIARKSDLRVHMRNLHAYSAAELKCRYCSAVFHERYALIQHQKTHKNEKRFKCKHCSYACKQERHMTAHIRTHTGEKPFTCLSCNKCFRQKQLLNAHFRKYHDANFIPTVYKCSKCGKGFSRWITSKWSGLKPQTFIT

SEQ ID NO: 1210 - protein, 665 aa, Homo sapiens
MAATEISVLSEQFTKIKELELMPEKGLKEEEKDGVCREKDHRSPSELEAERTSGAFQDSVLEEEVELVLAPSEESEKYILTLQTVHFTSEAVELQDMSLLSIQQQEGVQVVVQQPGPGLLWLEEGPRQSLQQCVAISIQQELYSPQEMEVLQFHALEENVMVASEDSKLAVSLAETTGLIKLEEEQEKNQLLAERTKEQLFFVETMSGDERSDEIVLTVSNSNVEEQEDQPTAGQADAEKAKSTKNQRKTKGAKGTFHCDVCMFTSSRMSSFNRHMKTHTSEKPHLCHLCLKTFRTVTLLRNHVNTHTGTRPYKCNDCNMAFVTSGELVRHRRYKHTHEKPFKCSMCKYASVEASKLKRHVRSHTGERPFQCCQCSYASRDTYKLKRHMRTHSGEKPYECHICHTRFTQSGTMKIHILQKHGENVPKYQCPHCATIIARKSDLRVHMRNLHAYSAAELKCRYCSAVFHERYALIQHQKTHKNEKRFKCKHCSYACKQERHMTAHIRTHTGEKPFTCLSCNKCFRQKQLLNAHFRKYHDANFIPTVYKCSKCGKGFSRWINLHRHSEKCGSGEAKSAASGKGRRTRKRKQTILKEATKGQKEAAKGWKEAANGDGVISAHRNLCLLGSSDSHASVSGAGITDARHHAWLIVLLFLVEMGFYHVSHS

SEQ ID NO: 1211 - protein, 483 aa, Homo sapiens
MAATEISVLSEQFTKIKELELMPEKGLKEEEKDGVCREKDHRSPSELEAERTSGAFQDSVLEEEVELVLAPSEESEKYILTLQTVHFTSEAVELQDMSLLSIQQQEGVQVVVQQPGPGLLWLEEGPRQSLQQCVAISIQQELYSPQEMEVLQFHALEENVMVASEDSKLAVSLAETTGLIKLEEEQEKNQLLAERTKEQLFFVETMSGDERSDEIVLTVSNSNVEEQEDQPTAGQADAEKAKSTKNQRKTKGAKGTFHCDVCMFTSSRMSSFNRHMKTHTSEKPHLCHLCLKTFRTVTLLRNHVNTHTGTRPYKCNDCNMAFVTSGELVRHRRYKHTHEKPFKCSMCKYASVEERHMTAHIRTHTGEKPFTCLSCNKCFRQKQLLNAHFRKYHDANFIPTVYKCSKCGKGFSRWILWVGNSEVAELGGPGSGPLLRLQSGCPPGLHHPKAGLGPEDPLPGQLRHTTAGTGLSSLLQGPLCRAA

SEQ ID NO: 1212 - protein, 422 aa, Homo sapiens
MSGDERSDEIVLTVSNSNVEEQEDQPTAGQADAEKAKSTKNQRKTKGAKGTFHCDVCMFTSSRMSSFNRHMKTHTSEKPHLCHLCLKTFRTVTLLRNHVNTHTGTRPYKCNDCNMAFVTSGELVRHRRYKHTHEKPFKCSMCKYASVEASKLKRHVRSHTGERPFQCCQCSYASRDTYKLKRHMRTHSGEKPYECHICHTRFTQSGTMKIHILQKHGENVPKYQCPHCATIIARKSDLRVHMRNLHAYSAAELKCRYCSAVFHERYALIQHQKTHKNEKRFKCKHCSYACKQERHMTAHIRTHTGEKPFTCLSCNKCFRQKQLLNAHFRKYHDANFIPTVYKCSKCGKGFSRWILWVGNSEVAELGGPGSGPLLRLQSGCPPGLHHPKAGLGPEDPLPGQLRHTTAGTGLSSLLQGPLCRAA

SEQ ID NO: 1213 - protein, 403 aa, Homo sapiens
MFTSSRMSSFNRHMKTHTSEKPHLCHLCLKTFRTVTLLRNHVNTHTGTRPYKCNDCNMAFVTSGELVRHRRYKHTHEKPFKCSMCKYASVEASKLKRHVRSHTGERPFQCCQCSYASRDTYKLKRHMRTHSGEKPYECHICHTRFTQSGTMKIHILQKHGENVPKYQCPHCATIIARKSDLRVHMRNLHAYSAAELKCRYCSAVFHERYALIQHQKTHKNEKRFKCKHCSYACKQERHMTAHIRTHTGEKPFTCLSCNKCFRQKQLLNAHFRKYHDANFIPTVYKCSKCGKGFSRWINLHRHSEKCGSGEAKSAASGKGRRTRKRKQTILKEATKGQKEAAKGWKEAANGDGVISAHRNLCLLGSSDSHASVSGAGITDARHHAWLIVLLFLVEMGFYHVSHS

SEQ ID NO: 1214 - protein, 700 aa, Homo sapiens
MAATEISVLSEQFTKIKELELMPEKGLKEEEKDGVCREKDHRSPSELEAERTSGAFQDSVLEEEVELVLAPSEESEKYILTLQTVHFTSEAVELQDMSLLSIQQQEGVQVVVQQPGPGLLWLEEGPRQSLQQCVAISIQQELYSPQEMEVLQFHALEENVMVASEDSKLAVSLAETTGLIKLEEEQEKNQLLAERTKEQLFFVETMSGDERSDEIVLTVSNSNVEEQEDQPTAGQADAEKAKSTKNQRKTKGAKGTFHCDVCMFTSSRMSSFNRHMKTHTSEKPHLCHLCLKTFRTVTLLRNHVNTHTGTRPYKCNDCNMAFVTSGELVRHRRYKHTHEKPFKCSMCKYASVEASKLKRHVRSHTGERPFQCCQCSYASRDTYKLKRHMRTHSGEKPYECHICHTRFTQSGTMKIHILQKHGENVPKYQCPHCATIIARKSDLRVHMRNLHAYSAAELKCRYCSAVFHERYALIQHQKTHKNEKRFKCKHCSYACKQERHMTAHIRTHTGEKPFTCLSCNKCFRQKQLLNAHFRKYHDANFIPTVYKCSKCGKGFSRWINLHRHSEKCGSGEAKSAASGKGRRTRKRKQTILKEATKGQKEAAKGWKEAANGDEAAAEEASTTKGEQFPGEMFPVACRETTARVKEEVDEGVTCEMLLNTMDNSAGCTGRMMLVSAWLLGRPQETYNQGRRRRGSRRVTW

SEQ ID NO: 1215 - protein, 613 aa, Homo sapiens
MAATEISVLSEQFTKIKELELMPEKGLKEEEKDGVCREKDHRSPSELEAERTSGAFQDSVLEEEVELVLAPSEESEKYILTLQTVHFTSEAVELQDMSLLSIQQQEGVQVVVQQPGPGLLWLEEGPRQSLQQCVAISIQQELYSPQEMEVLQFHALEENVMVASEDSKLAVSLAETTGLIKLEEEQEKNQLLAERTKEQLFFVETMSGDERSDEIVLTVSNSNVEEQEDQPTAGQADAEKAKSTKNQRKTKGAKGTFHCDVCMFTSSRMSSFNRHMKTHTSEKPHLCHLCLKTFRTVTLLRNHVNTHTGTRPYKCNDCNMAFVTSGELVRHRRYKHTHEKPFKCSMCKYASVEASKLKRHVRSHTGERPFQCCQCSYASRDTYKLKRHMRTHSGVHMRNLHAYSAAELKCRYCSAVFHERYALIQHQKTHKNEKRFKCKHCSYACKQERHMTAHIRTHTGEKPFTCLSCNKCFRQKQLLNAHFRKYHDANFIPTVYKCSKCGKGFSRWINLHRHSEKCGSGEAKSAASGKGRRTRKRKQTILKEATKGQKEAAKGWKEAANGDEAAAEEASTTKGEQFPGEMFPVACRETTARVKEEVDEGVTCEMLLNTMDK

SEQ ID NO: 1216 - protein, 427 aa, Homo sapiens
MAATEISVLSEQFTKIKELELMPEKGLKEEEKDGVCREKDHRSPSELEAERTSGAFQDSVLEEEVELVLAPSEESEKYILTLQTVHFTSEAVELQDMSLLSIQQQEGVQVVVQQPGPGLLWLEEGPRQSLQQCVAISIQQELYSPQEMEVLQFHALEENVMVASEDSKLAVSLAETTGLIKLEEEQEKNQLLAERTKEQLFFVETMSGDERSDEIVLTVSNSNVEEQEDQPTAGQADAEKAKSTKNQRKTKGAKGTFHCDVCMFTSSRMSSFNRHMKTHTSEKPHLCHLCLKTFRTVTLLRNHVNTHTGTRPYKCNDCNMAFVTSGELVRHRRYKHTHEKPFKCSMCKYASVEASKLKRHVRSHTGERPFQCCQCSYASRDTYKLKRHMRTHSEATSKRSLQEIPRCKFHPDCLQMLQVWQRLFPLD

SEQ ID NO: 1217 - protein, 460 aa, Homo sapiens
MSGDERSDEIVLTVSNSNVEEQEDQPTAGQADAEKAKSTKNQRKTKGAKGTFHCDVCMFTSSRMSSFNRHMKTHTSEKPHLCHLCLKTFRTVTLLRNHVNTHTGTRPYKCNDCNMAFVTSGELVRHRRYKHTHEKPFKCSMCKYASVEASKLKRHVRSHTGERPFQCCQCSYASRDTYKLKRHMRTHSGEKPYECHICHTRFTQSGTMKIHILQKHGENVPKYQCPHCATIIARKSDLRVHMRNLHAYSAAELKCRYCSAVFHERYALIQHQKTHKNEKRFKCKHCSYACKQERHMTAHIRTHTGEKPFTCLSCNKCFRQKQLLNAHFRKYHDANFIPTVYKCSKCGKGFSRWINLHRHSEKCGSGEAKSAASGKGRRTRKRKQTILKEATKGQKEAAKGWKEAANGDGVISAHRNLCLLGSSDSHASVSGAGITDARHHAWLIVLLFLVEMGFYHVSHS

SEQ ID NO: 1218 - protein, 299 aa, Homo sapiens
MFTSSRMSSFNRHMKTHTSEKPHLCHLCLKTFRTVTLLRNHVNTHTGTRPYKCNDCNMAFVTSGELVRHRRYKHTHEKPFKCSMCKYASVEASKLKRHVRSHTGERPFQCCQCSYASRDTYKLKRHMRTHSGEKPYECHICHTRFTQSGTMKIHILQKHGENVPKYQCPHCATIIARKSDLRVHMRNLHAYSAAELKCRYCSAVFHERYALIQHQKTHKNEKRFKCKHCSYACKQERHMTAHIRTHTGEKPFTCLSCNKCFRQKQLLNAHFRKYHDANFIPTVYKCSKCGKGFSRWVLY

SEQ ID NO: 1219 - protein, 452 aa, Homo sapiens
MSETPAQCSIKQERISYTPPESPVPSYASSTPLHVPVPRALRMEEDSIRLPAHLRLQPIYWSRDDVAQWLKWAENEFSLRPIDSNTFEMNGKALLLLTKEDFRYRSPHSGDVLYELLQHILKQRKPRILFSPFFHPGNSIHTQPEVILHQNHEEDNCVQRTPRPSVDNVHHNPPTIELLHRSRSPITTNHRPSPDPEQRPLRSPLDNMIRRLSPAERAQGPRPHQENNHQESYPLSVSPMENNHCPASSESHPKPSSPRQESTRVIQLMPSPIMHPLILNPRHSVDFKQSRLSEDGLHREGKPINLSHREDLAYMNHIMVSVSPPEEHAMPIGRIADCRLLWDYVYQLLSDSRYENFIRWEDKESKIFRIVDPNGLARLWGNHKNRTNMTYEKMSRALRHYYKLNIIRKEPGQRLLFRFMKTPDEIMSGRTDRLEHLESQELDEQIYQEDEC

SEQ ID NO: 1220 - protein, 1397 aa, Homo sapiens
MEEISAAAVKVVPGPERPSPFSQLVYTSNDSYIVHSGDLRKIHKAASRGQVRKLEKMTKRKKTINLNIQDAQKRTALHWACVNGHEEVVTFLVDRKCQLDVLDGEHRTPLMKALQCHQEACANILIDSGADINLVDVYGNTALHYAVYSEILSVVAKLLSHGAVIEVHNKASLTPLLLSITKRSEQIVEFLLIKNANANAVNKYKCTALMLAVCHGSSEIVGMLLQQNVDVFAADICGVTAEHYAVTCGFHHIHEQIMEYIRKLSKNHQNTNPEGTSAGTPDEAAPLAERTPDTAESLVEKTPDEAAPLVERTPDTAESLVEKTPDEAASLVEGTSDKIQCLEKATSGKFEQSAEETPREITSPAKETSEKFTWPAKGRPRKIAWEKKEDTPREIMSPAKETSEKFTWAAKGRPRKIAWEKKETPVKTGCVARVTSNKTKVLEKGRSKMIACPTKESSTKASANDQRFPSESKQEEDEEYSCDSRSLFESSAKIQVCIPESIYQKVMEINREVEEPPKKPSAFKPAIEMQNSVPNKAFELKNEQTLRADPMFPPESKQKDYEENSWDSESLCETVSQKDVCLPKATHQKEIDKINGKLEESPNKDGLLKATCGMKVSIPTKALELKDMQTFKAEPPGKPSAFEPATEMQKSVPNKALELKNEQTLRADEILPSESKQKDYEENSWDTESLCETVSQKDVCLPKAAHQKEIDKINGKLEGSPVKDGLLKANCGMKVSIPTKALELMDMQTFKAEPPEKPSAFEPAIEMQKSVPNKALELKNEQTLRADEILPSESKQKDYEESSWDSESLCETVSQKDVCLPKATHQKEIDKINGKLEESPDNDGFLKAPCRMKVSIPTKALELMDMQTFKAEPPEKPSAFEPAIEMQKSVPNKALELKNEQTLRADQMFPSESKQKKVEENSWDSESLRETVSQKDVCVPKATHQKEMDKISGKLEDSTSLSKILDTVHSCERARELQKDHCEQRTGKMEQMKKKFCVLKKKLSEAKEIKSQLENQKVKWEQELCSVRLTLNQEEEKRRNADILNEKIREELGRIEEQHRKELEVKQQLEQALRIQDIELKSVESNLNQVSHTHENENYLLHENCMLKKEIAMLKLEIATLKHQYQEKENKYFEDIKILKEKNAELQMTLKLKEESLTKRASQYSGQLKVLIAENTMLTSKLKEKQDKEILEAEIESHHPRLASAVQDHDQIVTSRKSQEPAFHIAGDACLQRKMNVDVSSTIYNNEVLHQPLSEAQRKSKSLKINLNYAGDALRENTLVSEHAQRDQRETQCQMKEAEHMYQNEQDNVNKHTEQQESLDQKLFQLQSKNMWLQQQLVHAHKKADNKSKITIDIHFLERKMQHHLLKEKNEEIFNYNNHLKNRIYQYEKEKAETENS

SEQ ID NO: 1221 - protein, 181 aa, Homo sapiens
MCKGLAALPHSCLERAKEIKIKLGILLQKPDSVGDLVIPYNEKPEKPAKTQKTSLDEALQWRDSLDKLLQNNYGLASFKSFLKSEFSEENLEFWIACEDYKKIKSPAKMAEKAKQIYEEFIQTEAPKEVNIDHFTKDITMKNLVEPSLSSFDMAQKRIHALMEKDSLPRFVRSEFYQELIK

SEQ ID NO: 1222 - protein, 73 aa, Homo sapiens
MAEKAKQIYEEFIQTEAPKEVNIDHFTKDITMKNLVEPSLSSFDMAQKRIHALMEKDSLPRFVRSEFYQELIK

SEQ ID NO: 1223 - protein, 185 aa, Homo sapiens
MCKGLAALPHSCLERAKEIKIKLGILLQKPDSVGDLVIPYNEKPEKPAKTQKTSLDEALQWRDSLDKLLQNNYGLASFKSFLKSEFSEENLEFWIACEDYKKIKSPAKMAEKAKQIYEEFIQTEAPKEVGLWVNIDHFTKDITMKNLVEPSLSSFDMAQKRIHALMEKDSLPRFVRSEFYQELIK

SEQ ID NO: 1224 - protein, 963 aa, Homo sapiens
MATAAETSASEPEAESKAGPKADGEEDEVKAARTRRKVLSRAVAAATYKTMGPAWDQQEEGVSESDGDEYAMASSAESSPGEYEWEYDEEEEKNQLEIERLEEQLSINVYDYNCHVDLIRLLRLEGELTKVRMARQKMSEIFPLTEELWLEWLHDEISMAQDGLDREHVYDLFEKAVKDYICPNIWLEYGQYSVGGIGQKGGLEKVRSVFERALSSVGLHMTKGLALWEAYREFESAIVEAARLEKVHSLFRRQLAIPLYDMEATFAEYEEWSEDPIPESVIQNYNKALQQLEKYKPYEEALLQAEAPRLAEYQAYIDFEMKIGDPARIQLIFERALVENCLVPDLWIRYSQYLDRQLKVKDLVLSVHNRAIRNCPWTVALWSRYLLAMERHGVDHQVISVTFEKALNAGFIQATDYVEIWQAYLDYLRRRVDFKQDSSKELEELRAAFTRALEYLKQEVEERFNESGDPSCVIMQNWARIEARLCNNMQKARELWDSIMTRGNAKYANMWLEYYNLERAHGDTQHCRKALHRAVQCTSDYPEHVCEVLLTMERTEGSLEDWDIAVQKTETRLARVNEQRMKAAEKEAALVQQEEEKAEQRKRARAEKKALKKKKKIRGPEKRGADEDDEKEWGDDEEEQPSKRRRVENSIPAAGETQNVEVAAGPAGKCAAVDVEPPSKQKEKAASLKRDMPKVLHDSSKDSITVFVSNLPYSMQEPDTKLRPLFEACGEVVQIRPIFSNRGDFRGYCYVEFKEEKSALQALEMDRKSVEGRPMFVSPCVDKSKNPDFKVFRYSTSLEKHKLFISGLPFSCTKEELEEICKAHGTVKDLRLVTNRAGKPKGLAYVEYENESQASQAVMKMDGMTIKENIIKVAISNPPQRKVPEKPETRKAPGGPMLLPQTYGARGKGRTQLSLLPRALQRPSAAAPQAENGPAAAPAVAAPAATEAPKMSNADFAKLFLRK

SEQ ID NO: 1225 - protein, 364 aa, Homo sapiens
MATAAETSASEPEAESKAGPKADGEEDEVKAARTRRKVLSRAVAAATYKTMGPAWDQQEEGVSESDGDEYAMASSAESSPGEYEWEYDEEEEKNQLEIERLEEQLSINVYDYNCHVDLIRLLRLEGELTKVRMARQKMSEIFPLTEELWLEWLHDEISMAQDGLDREHVYDLFEKAVKDYICPNIWLEYGQYSVGGIGQKGGLEKVRSVFERALSSVGLHMTKGLALWEAYREFESAIVEAARLEKVHSLFRRQLAIPLYDMEATFAEYEEWSEDPIPESVIQNYNKALQQLEKYKPYEEALLQAEAPRLAEYQAYIDFEMKIGDPARIQLIFERALVENCLVPDLWIRYRSTTESKGFGFICT

SEQ ID NO: 1226 - protein, 129 aa, Homo sapiens
MATAAETSASEPEAESKAGPKADGEEDEVKAARTRRKVLSRAVAAATYKTMGPAWDQQEEGVSESDGDEYAMASSAESSPGEYEWEYDEEEEKNQLEIERLEEQVGPGVGSGHLPVFQVLGSPCPGPPP

SEQ ID NO: 1227 - protein, 927 aa, Homo sapiens
MATAAETSASEPEAESKAGPKADGEEDEVKAARTRRKVLSRAVAAATYKTMGPAWDQQEEGVSESDGDEYAMASSAESSPGEYEWEYDEEEEKNQLEIERLEEQLSINVYDYNCHVDLIRLLRLEGELTKVRMARQKMSEIFPLTEELWLEWLHDEISMAQDGLDREHVYDLFEKAVKDYICPNIWLEYGQYSVGGIGQKGGLEKVRSVFERALSSVGLHMTKGLALWEAYREFESAIVEAARLEKVHSLFRRQLAIPLYDMEATFAEYEEWSEDPIPESVIQNYNKALQQLEKYKPYEEALLQAEAPRLAEYQAYIDFEMKIGDPARIQLIFERALVENCLVPDLWIRYSQYLDRQLKVKDLVLSVHNRAIRNCPWTVALWSRYLLAMERHGVDHQVISDSSKELEELRAAFTRALEYLKQEVEERFNESGDPSCVIMQNWARIEARLCNNMQKARELWDSIMTRGNAKYANMWLEYYNLERAHGDTQHCRKALHRAVQCTSDYPEHVCEVLLTMERTEGSLEDWDIAVQKTETRLARVNEQRMKAAEKEAALVQQEEEKAEQRKRARAEKKALKKKKKIRGPEKRGADEDDEKEWGDDEEEQPSKRRRVENSIPAAGETQNVEVAAGPAGKCAAVDVEPPSKQKEKAASLKRDMPKVLHDSSKDSITVFVSNLPYSMQEPDTKLRPLFEACGEVVQIRPIFSNRGDFRGYCYVEFKEEKSALQALEMDRKSVEGRPMFVSPCVDKSKNPDFKVFRYSTSLEKHKLFISGLPFSCTKEELEEICKAHGTVKDLRLVTNRAGKPKGLAYVEYENESQASQAVMKMDGMTIKENIIKVAISNPPQRKVPEKPETRKAPGGPMLLPQTYGARGKGRTQLSLLPRALQRPSAAAPQAENGPAAAPAVAAPAATEAPKMSNADFAKLFLRK

SEQ ID NO: 1228 - protein, 459 aa, Homo sapiens; identical to SEQ ID NO: 1067

SEQ ID NO: 1229 - protein, 391 aa, Homo sapiens
MDLEKNYPTPRTSRTGHGGVNQLGGVFVNGRPLPDVVRQRIVELAHQGVRPCDISRQLRVSHGCVSKILGRYYETGSIKPGVIGGSKPKVATPKVVEKIAEYKRQNPTMFAWEIRDRLLAERVCDNDTVPSVSSINRIIRTKVQQPPNQPVPASSHSIVSTGSVTQVSSVSTDSAGSSYSISGILGITSPSADTNKRKRDEGIQESPVPNGHSLPGRDFLRKQMRGDLFTQQQLEVLDRVFERQHYSDIFTTTEPIKPEQTTEYSAMASLAGGLDDMKANLASPTPADIGSSVPGPQSYPIVTGRDLASTTLPGYPPHVPPAGQGSYSAPTLTGMVPGSEFSGSPYSHPQYSSYNDSWRFPNPGLLGSPYYYSAAARGAAPPAAATAYDRH

SEQ ID NO: 1230 - protein, 362 aa, Homo sapiens
MDLEKNYPTPRTSRTGHGGVNQLGGVFVNGRPLPDVVRQRIVELAHQGVRPCDISRQLRVSHGCVSKILGRYYETGSIKPGVIGGSKPKVATPKVVEKIAEYKRQNPTMFAWEIRDRLLAERVCDNDTVPSVSSINRIIRTKVQQPPNQPVPASSHSIVSTGSVTQVSSVSTDSAGSSYSISGILGITSPSADTNKRKRDEGIQESPVPNGHSLPGRDFLRKQMRGDLFTQQQLEVLDRVFERQHYSDIFTTTEPIKPEQTTEYSAMASLAGGLDDMKANLASPTPADIGSSVPGPQSYPIVTGRDLASTTLPGYPPHVPPAGQGSYSAPTLTGMVPGSPYYYSAAARGAAPPAAATAYDRH

SEQ ID NO: 1231 - protein, 324 aa, Homo sapiens
MDLEKNYPTPRTSRTGHGGVNQLGGVFVNGRPLPDVVRQRIVELAHQGVRPCDISRQLRVSHGCVSKILGRYYETGSIKPGVIGGSKPKVATPKVVEKIAEYKRQNPTMFAWEIRDRLLAERVCDNDTVPSVSSINRIIRTKVQQPPNQPVPASSHSIVSTGSVTQVSSVSTDSAGSSYSISGILGITSPSADTNKRKRDEGIQESPVPNGHSLPGRDFLRKQMRGDLFTQQQLEVLDRVFERQHYSDIFTTTEPIKPEQGVSFPGVPTATLSIPRTTTPGGSPTRGCLAPPIIIALPPEEPPHLQPPLPMTVTDPWSQAGTKH

SEQ ID NO: 1232 - protein, 295 aa, Homo sapiens
MDLEKNYPTPRTSRTGHGGVNQLGGVFVNGRPLPDVVRQRIVELAHQGVRPCDISRQLRVSHGCVSKILGRYYETGSIKPGVIGGSKPKVATPKVVEKIAEYKRQNPTMFAWEIRDRLLAERVCDNDTVPSVSSINRIIRTKVQQPPNQPVPASSHSIVSTGSVTQVSSVSTDSAGSSYSISGILGITSPSADTNKRKRDEGIQESPVPNGHSLPGRDFLRKQMRGDLFTQQQLEVLDRVFERQHYSDIFTTTEPIKPEQAPPIIIALPPEEPPHLQPPLPMTVTDPWSQAGTKH

SEQ ID NO: 1233 - protein, 288 aa, Homo sapiens
MDLEKNYPTPRTSRTGHGGVNQLGGVFVNGRPLPDVVRQRIVELAHQGVRPCDISRQLRVSHGCVSKILGRYYETGSIKPGVIGGSKPKVATPKVVEKIAEYKRQNPTMFAWEIRDRLLAERVCDNDTVPSVSSINRIIRTKVQQPPNQPVPASSHSIVSTGSVTQVSSVSTDSAGSSYSISGILGITSPSADTNKRKRDEGIQESPVPNGHSLPGRDFLRKQMRGDLFTQQQLEVLDRVFERQHYSDIFTTTEPIKPEQAVTWRARPSPGTLHTSPPLDRAATQHRR

SEQ ID NO: 1234 - protein, 357 aa, Homo sapiens
MDLEKNYPTPRTSRTGHGGVNQLGGVFVNGRPLPDVVRQRIVELAHQGVRPCDISRQLRVSHGCVSKILGRYYETGSIKPGVIGGSKPKVATPKVVEKIAEYKRQNPTMFAWEIRDRLLAERVCDNDTVPSVSSINRIIRTKVQQPPNQPVPASSHSIVSTGSVTQVSSVSTDSAGSSYSISGILGITSPSADTNKRKRDEGIQESPVPNGHSLPGRDFLRKQMRGDLFTQQQLEVLDRVFERQHYSDIFTTTEPIKPEQTTEYSAMASLAGGLDDMKANLASPTPADIGSSVPGPQSYPIVTGSEFSGSPYSHPQYSSYNDSWRFPNPGLLGSPYYYSAAARGAAPPAAATAYDRH

SEQ ID NO: 1235 - protein, 328 aa, Homo sapiens
MDLEKNYPTPRTSRTGHGGVNQLGGVFVNGRPLPDVVRQRIVELAHQGVRPCDISRQLRVSHGCVSKILGRYYETGSIKPGVIGGSKPKVATPKVVEKIAEYKRQNPTMFAWEIRDRLLAERVCDNDTVPSVSSINRIIRTKVQQPPNQPVPASSHSIVSTGSVTQVSSVSTDSAGSSYSISGILGITSPSADTNKRKRDEGIQESPVPNGHSLPGRDFLRKQMRGDLFTQQQLEVLDRVFERQHYSDIFTTTEPIKPEQTTEYSAMASLAGGLDDMKANLASPTPADIGSSVPGPQSYPIVTGSPYYYSAAARGAAPPAAATAYDRH

SEQ ID NO: 1236 - protein, 348 aa, Homo sapiens
MDLEKNYPTPRTSRTGHGGVNQLGGVFVNGRPLPDVVRQRIVELAHQGVRPCDISRQLRVSHGCVSKILGRYYETGSIKPGVIGGSKPKVATPKVVEKIAEYKRQNPTMFAWEIRDRLLAERVCDNDTVPSVSSINRIIRTKVQQPPNQPVPASSHSIGIQESPVPNGHSLPGRDFLRKQMRGDLFTQQQLEVLDRVFERQHYSDIFTTTEPIKPEQTTEYSAMASLAGGLDDMKANLASPTPADIGSSVPGPQSYPIVTGRDLASTTLPGYPPHVPPAGQGSYSAPTLTGMVPGSEFSGSPYSHPQYSSYNDSWRFPNPGLLGSPYYYSAAARGAAPPAAATAYDRH

SEQ ID NO: 1237 - protein, 319 aa, Homo sapiens
MDLEKNYPTPRTSRTGHGGVNQLGGVFVNGRPLPDVVRQRIVELAHQGVRPCDISRQLRVSHGCVSKILGRYYETGSIKPGVIGGSKPKVATPKVVEKIAEYKRQNPTMFAWEIRDRLLAERVCDNDTVPSVSSINRIIRTKVQQPPNQPVPASSHSIGIQESPVPNGHSLPGRDFLRKQMRGDLFTQQQLEVLDRVFERQHYSDIFTTTEPIKPEQTTEYSAMASLAGGLDDMKANLASPTPADIGSSVPGPQSYPIVTGRDLASTTLPGYPPHVPPAGQGSYSAPTLTGMVPGSPYYYSAAARGAAPPAAATAYDRH

SEQ ID NO: 1238 - protein, 291 aa, Homo sapiens
MDLEKNYPTPRTSRTGHGGVNQLGGVFVNGRPLPDVVRQRIVELAHQGVRPCDISRQLRVSHGCVSKILGRIIRTKVQQPPNQPVPASSHSIVSTGSVTQVSSVSTDSAGSSYSISGILGITSPSADTNKRKRDEGIQESPVPNGHSLPGRDFLRKQMRGDLFTQQQLEVLDRVFERQHYSDIFTTTEPIKPEQTTEYSAMASLAGGLDDMKANLASPTPADIGSSVPGPQSYPIVTGSEFSGSPYSHPQYSSYNDSWRFPNPGLLGSPYYYSAAARGAAPPAAATAYDRH

SEQ ID NO: 1239 - protein, 307 aa, Homo sapiens
MDLEKNYPTPRTSRTGHGGVNQLGGVFVNGRPLPDVVRQRIVELAHQGVRPCDISRQLRVSHGCVSKILGRYYETGSIKPGVIGGSKPKVATPKVVEKIAEYKRQNPTMFAWEIRDRLLAERVCDNDTVPSVSSINRIIRTKVQQPPNQPVPASSHSIVSTGSVTQVSSVSTDSAGSSYSISGILGITSPSADTNKRKRDEGIQESPVPNGHSLPGRDFLRKQMRGDLFTQQQLEVLDRVFERQHYSDIFTTTEPIKPEQWCPVLMRQYLVQPQAVLFQAVTWRARPSPGTLHTSPPLDRAATQHRR

SEQ ID NO: 1240 - protein, 543 aa, Homo sapiens
MRKPAAGFLPSLLKVLLLPLAPAAAQDSTQASTPGSPLSPTEYERFFALLTPTWKAETTCRLRATHGCRNPTLVQLDQYENHGLVPDGAVCSNLPYASWFESFCQFTHYRCSNHVYYAKRVLCSQPVSILSPNTLKEIEASAEVSPTTMTSPISPHFTVTERQTFQPWPERLSNNVEELLQSSLSLGGQEQAPEHKQEQGVEHRQEPTQEHKQEEGQKQEEQEEEQEEEGKQEEGQGTKEGREAVSQLQTDSEPKFHSESLSSNPSSFAPRVREVESTPMIMENIQELIRSAQEIDEMNEIYDENSYWRNQNPGSLLQLPHTEALLVLCYSIVENTCIITPTAKAWKYMEEEILGFGKSVCDSLGRRHMSTCALCDFCSLKLEQCHSEASLQRQQCDTSHKTPFVSPLLASQSLSIGNQVGSPESGRFYGLDLYGGLHMDFWCARLATKGCEDVRVSGWLQTEFLSFQDGDFPTKICDTDYIQYPNYCSFKSQQCLMRNRNRKVSRMRCLQNETYSALSPGKSEDVVLRWSQEFSTLTLGQFG

SEQ ID NO: 1241 - protein, 151 aa, Homo sapiens
MSIPFSNTHYRIPQGFGNLLEGLTREILREQPDNIPAFAAAYFESLLEKREKTNFDPAEWGSKVEDRFYNNHAFEEQEPPEKSDPKQEESQISGKEEETSVTILDSSEEDKEKEEVAAVKIQAAFRGHIAREEAKKMKTNSLQNEEKEENK

SEQ ID NO: 1242 - protein, 509 aa, Homo sapiens
MGCGCSSHPEDDWMENIDVCENCHYPIVPLDGKGTLLIRNGSEVRDPLVTYEGSNPPASPLQDNLVIALHSYEPSHDGDLGFEKGEQLRILEQSGEWWKAQSLTTGQEGFIPFNFVAKANSLEPEPWFFKNLSRKDAERQLLAPGNTHGSFLIRESESTAGSFSLSVRDFDQNQGEVVKHYKIRNLDNGGFYISPRITFPGLHELVRHYTNASDGLCTRLSRPCQTQKPQKPWWEDEWEVPRETLKLVERLGAGQFGEVWMGYYNGHTKVAVKSLKQGSMSPDAFLAEANLMKQLQHQRLVRLYAVVTQEPIYIITEYMENGSLVDFLKTPSGIKLTINKLLDMAAQIAEGMAFIEERNYIHRDLRAANILVSDTLSCKIADFGLARLIEDNEYTAREGAKFPIKWTAPEAINYGTFTIKSDVWSFGILLTEIVTHGRIPYPGMTNPEVIQNLERGYRMVRPDNCPEELYQLMRLCWKERPEDRPTFDYLRSVLEDFFTATEGQYQPQP

SEQ ID NO: 1243 - protein, 363 aa, Homo sapiens
MGCGCSSHPEDDWMENIDVCENCHYPIVPLDGKGTLLIRNGSEVRDPLVTYEGSNPPASPLQDNLVIALHSYEPSHDGDLGFEKGEQLRILEQSGEWWKAQSLTTGQEGFIPFNFVAKANSLEPEPWFFKNLSRKDAERQLLAPGNTHGSFLIRESESTAGSFSLSVRDFDQNQGEVVKHYKIRNLDNGGFYISPRITFPGLHELVRHYTNASDGLCTRLSRPCQTQKPQKPWWEDEWEVPRETLKLVERLGAGQFGEVWMGYYNGHTKVAVKSLKQGSMSPDAFLAEANLMKQLQHQRLVRLYAVVTQEPIYIITEYMENGSLVDFLKTPSGIKLTINKLLDMAAQVRRLGRGAGQGNRPVT

SEQ ID NO: 1244 - protein, 539 aa, Homo sapiens
MGCGCSSHPEDDWMENIDVCENCHYPIVPLDGKGTLLIRNGSEVRDPLVTYEGSNPPASPLQDNLVIALHSYEPSHDGDLGFEKGEQLRILEQSGEWWKAQSLTTGQEGFIPFNFVAKANSLEPEPWFFKNLSRKDAERQLLAPGNTHGSFLIRESESTAGSFSLSVRDFDQNQGEVVKHYKIRNLDNGGFYISPRITFPGLHELVRHYTNASDGLCTRLSRPCQTQKPQKPWWEDEWEVPRETLKLVERLGAGQFGEVWMGYYNGHTKVAVKSLKQGSMSPDAFLAEANLMKQLQHQRLVRLYAVVTQEPIYIITEYMENDTLLDSQLEEKGLGASPWGNLGQQLLLLPTGSLVDFLKTPSGIKLTINKLLDMAAQIAEGMAFIEERNYIHRDLRAANILVSDTLSCKIADFGLARLIEDNEYTAREGAKFPIKWTAPEAINYGTFTIKSDVWSFGILLTEIVTHGRIPYPGMTNPEVIQNLERGYRMVRPDNCPEELYQLMRLCWKERPEDRPTFDYLRSVLEDFFTATEGQYQPQP

SEQ ID NO: 1245 - protein, 2322 aa, Homo sapiens
MQSGPRPPLPAPGLALALTLTMLARLASAASFFGENHLEVPVATALTDIDLQLQFSTSQPEALLLLAAGPADHLLLQLYSGRLQVRLVLGQEELRLQTPAETLLSDSIPHTVVLTVVEGWATLSVDGFLNASSAVPGAPLEVPYGLFVGGTGTLGLPYLRGTSRPLRGCLHAATLNGRSLLRPLTPDVHEGCAEEFSASDDVALGFSGPHSLAAFPAWGTQDEGTLEFTLTTQSRQAPLAFQAGGRRGDFIYVDIFEGHLRAVVEKGQGTVLLHNSVPVADGQPHEVSVHINAHRLEISVDQYPTHTSNRGVLSYLEPRGSLLLGGLDAEASRHLQEHRLGLTPEATNASLLGCMEDLSVNGQRRGLREALLTRNMAAGCRLEEEEYEDDAYGHYEAFSTLAPEAWPAMELPEPCVPEPGLPPVFANFTQLLTISPLVVAEGGTAWLEWRHVQPTLDLMEAELRKSQVLFSVTRGARHGELELDIPGAQARKMFTLLDVVNRKARFIHDGSEDTSDQLVLEVSVTARVPMPSCLRRGQTYLLPIQVNPVNDPPHIIFPHGSLMVILEHTQKPLGPEVFQAYDPDSACEGLTFQVLGTSSGLPVERRDQPGEPATEFSCRELEAGSLVYVHRGGPAQDLTFRVSDGLQASPPATLKVVAIRPAIQIHRSTGLRLAQGSAMPILPANLSVETNAVGQDVSVLFRVTGALQFGELQKQGAGGVEGAEWWATQAFHQRDVEQGRVRYLSTDPQHHAYDTVENLALEVQVGQEILSNLSFPVTIQRATVWMLRLEPLHTQNTQQETLTTAHLEATLEEAGPSPPTFHYEVVQAPRKGNLQLQGTRLSDGQGFTQDDIQAGRVTYGATARASEAVEDTFRFRVTAPPYFSPLYTFPIHIGGDPDAPVLTNVLLVVPEGGEGVLSADHLFVKSLNSASYLYEVMERPRHGRLAWRGTQDKTTMVTSFTNEDLLRGRLVYQHDDSETTEDDIPFVATRQGESSGDMAWEEVRGVFRVAIQPVNDHAPVQTISRIFHVARGGRRLLTTDDVAFSDADSGFADAQLVLTRKDLLFGSIVAVDEPTRPIYRFTQEDLRKRRVLFVHSGADRGWIQLQVSDGQHQATALLEVQASEPYLRVANGSSLVVPQGGQGTIDTAVLHLDTNLDIRSGDEVHYHVTAGPRWGQLVRAGQPATAFSQQDLLDGAVLYSHNGSLSPRDTMAFSVEAGPVHTDATLQVTIALEGPLAPLKLVRHKKIYVFQGEAAEIRRDQLEAAQEAVPPADIVFSVKSPPSAGYLVMVSRGALADEPPSLDPVQSFSQEAVDTGRVLYLHSRPEAWSDAFSLDVASGLGAPLEGVLVELEVLPAAIPLEAQNFSVPEGGSLTLAPPLLRVSGPYFPTLLGLSLQVLEPPQHGALQKEDGPQARTLSAFSWRMVEEQLIRYVHDGSETLTDSFVLMANASEMDRQSHPVAFTVTVLPVNDQPPILTTNTGLQMWEGATAPIPAEALRSTDGDSGSEDLVYTIEQPSNGRVVLRGAPGTEVRSFTQAQLDGGLVLFSHRGTLDGGFRFRLSDGEHTSPGHFFRVTAQKQVLLSLKGSQTLTVCPGSVQPLSSQTLRASSSAGTDPQLLLYRVVRGPQLGRLFHAQQDSTGEALVNFTQAEVYAGNILYEHEMPPEPFWEAHDTLELQLSSPPARDVAATLAVAVSFEAACPQRPSHLWKNKGLWVPEGQRARITVAALDASNLLASVPSPQRSEHDVLFQVTQFPSRGQLLVSEEPLHAGQPHFLQSQLAAGQLVYAHGGGGTQQDGFHFRAHLQGPAGASVAGPQTSEAFAITVRDVNERPPQPQASVPLRLTRGSRAPISRAQLSVVDPDSAPGEIEYEVQRAPHNGFLSLVGGGLGPVTRFTQADVDSGRLAFVANGSSVAGIFQLSMSDGASPPLPMSLAVDILPSAIEVQLRAPLEVPQALGRSSLSQQQLRVVSDREEPEAAYRLIQGPQYGHLLVGGRPTSAFSQFQIDQGEVVFAFTNFSSSHDHFRVLALARGVNASAVVNVTVRALLHVWAGGPWPQGATLRLDPTVLDAGELANRTGSVPRFRLLEGPRHGRVVRVPRARTEPGGSQLVEQFTQQDLEDGRLGLEVGRPEGRAPGPAGDSLTLELWAQGVPPAVASLDFATEPYNAARPYSVALLSVPEAARTEAGKPESSTPTGEPGPMASSPEPAVAKGGFLSFLEANMFSVIIPMCLVLLLLALILPLLFYLRKRNKTGKHDVQVLTAKPRNGLAGDTETFRKVEPGQAIPLTAVPGQGPPPGGQPDPELLQFCRTPNPALKNGQYWV

SEQ ID NO: 1246 - protein, 854 aa, Homo sapiens
MMAYSDTTMMSDDIDWLRSHRGVCKVDLYNPEGQQDQDRKVICFVDVSTLNVEDKDYKDAASSSSEGNLNLGSLEEKEIIVIKDTEKKDQSKTEGSVCLFKQAPSDPVSVLNWLLSDLQKYALGFQHALSPSTSTCKHKVGDTEGEYHRASSENCYSVYADQVNIDYLMNRPQNLRLEMTAAKNTNNNQSPSAPPAKPPSTQRAVISPDGECSIDDLSFYVNRLSSLVIQMAHKEIKEKLEGKSKCLHHSICPSPGNKERISPRTPASKIASEMAYEAVELTAAEMRGTGEESREGGQKSFLYSELSNKSKSGDKQMSQRESKEFADSISKGLMVYANQVASDMMVSLMKTLKVHSSGKPIPASVVLKRVLLRHTKEIVSDLIDSCMKNLHNITGVLMTDSDFVSAVKRNLFNQWKQNATDIMEAMLKRLVSALIGEEKETKSQSLSYASLKAGSHDPKCRNQSLEFSTMKAEMKERDKGKMKSDPCKSLTSAEKVGEHILKEGLTIWNQKQGNSCKVATKACSNKDEKGEKINASTDSLAKDLIVSALKLIQYHLTQQTKGKDTCEEDCPGSTMGYMAQSTQYEKCGGGQSAKALSVKQLESHRAPGPSTCQKENQHLDSQKMDMSNIVLMLIQKLLNENPFKCEDPCEGENKCSEPRASKAASMSNRSDKAEEQCQEHQELDCTSGMKQANGQFIDKLVESVMKLCLIMAKYSNDGAALAELEEQAASANKPNFRGTRCIHSGAMPQNYQDSLGHEVIVNNQCSTNSLQKQLQAVLQWIAASQFNVPMLYFMGDKDGQLEKLPQVSAKAAEKGYSVGGLLQEVMKFAKERQPDEAVGKVARKQLLDWLLANL

SEQ ID NO: 1247 - protein, 845 aa, Homo sapiens
MSDDIDWLRSHRGVCKVDLYNPEGQQDQDRKVICFVDVSTLNVEDKDYKDAASSSSEGNLNLGSLEEKEIIVIKDTEKKDQSKTEGSVCLFKQAPSDPVSVLNWLLSDLQKYALGFQHALSPSTSTCKHKVGDTEGEYHRASSENCYSVYADQVNIDYLMNRPQNLRLEMTAAKNTNNNQSPSAPPAKPPSTQRAVISPDGECSIDDLSFYVNRLSSLVIQMAHKEIKEKLEGKSKCLHHSICPSPGNKERISPRTPASKIASEMAYEAVELTAAEMRGTGEESREGGQKSFLYSELSNKSKSGDKQMSQRESKEFADSISKGLMVYANQVASDMMVSLMKTLKVHSSGKPIPASVVLKRVLLRHTKEIVSDLIDSCMKNLHNITGVLMTDSDFVSAVKRNLFNQWKQNATDIMEAMLKRLVSALIGEEKETKSQSLSYASLKAGSHDPKCRNQSLEFSTMKAEMKERDKGKMKSDPCKSLTSAEKVGEHILKEGLTIWNQKQGNSCKVATKACSNKDEKGEKINASTDSLAKDLIVSALKLIQYHLTQQTKGKDTCEEDCPGSTMGYMAQSTQYEKCGGGQSAKALSVKQLESHRAPGPSTCQKENQHLDSQKMDMSNIVLMLIQKLLNENPFKCEDPCEGENKCSEPRASKAASMSNRSDKAEEQCQEHQELDCTSGMKQANGQFIDKLVESVMKLCLIMAKYSNDGAALAELEEQAASANKPNFRGTRCIHSGAMPQNYQDSLGHEVIVNNQCSTNSLQKQLQAVLQWIAASQFNVPMLYFMGDKDGQLEKLPQVSAKAAEKGYSVGGLLQEVMKFAKERQPDEAVGKVARKQLLDWLLANL

SEQ ID NO: 1248 - protein, 188 aa, Homo sapiens
MNGDDAFARRPTVGAQIPEKIQKAFDDIAKYFSKEEWEKMKASEKIFYVYMKRKYEAMTKLGFKATLPPFMCNKRAEDFQGNDLDNDPNRGNQVERPQMTFGRLQGISPKIMPKKPAEEGNDSEEVPEASGPQNDGKELCPPGKPTTSEKIHERSGPKRGEHAWTHRLRERKQLVIYEEISDPEEDDE

SEQ ID NO: 1249 - protein, 223 aa, Homo sapiens
MNGDDAFARRPTVGAQIPEKIQKAFDDIAKYFSKEEWEKMKASEKIFYVYMKRKYEAMTKLGFKATLPPFMCNKRAEDFQGNDLDNDPNRGNQVERPQMTFGRLQGISPKIMPKKPAEEGNDSEEVPEASGPQNDGKELCPPGKPTTSEKIHERSGNREAQEKEERRGTAHRWSSQNTHNIGRFSLSTSMGAVHGTPKTITHNRDPKGGNMPGPTDCVRENSW

SEQ ID NO: 1250 - protein, 81 aa, Homo sapiens
MESPKKKNQQLKVGILHLGSRQKKIRIQLRSQCATWKVICKSCISQTPGINLDLGSGVKVKIIPKEEHCKMPEAGEEQPQV

SEQ ID NO: 1251 - protein, 69 aa, Homo sapiens
MESPKKKNQQLKVGILHLGSRQKKIRIQLRSQVLGREMRDMEGDLQELHQSNTGDKSGFGFRRQGEDNT

SEQ ID NO: 1252 - protein, 433 aa, Homo sapiens
MVWKVAVFLSVALGIGAVPIDDPEDGGKHWVVIVAGSNGWYNYRHQADACHAYQIIHRNGIPDEQIVVMMYDDIAYSEDNPTPGIVINRPNGTDVYQGVPKDYTGEDVTPQNFLAVLRGDAEAVKGIGSGKVLKSGPQDHVFIYFTDHGSTGILVFPNEDLHVKDLNETIHYMYKHKMYRKMVFYIEACESGSMMNHLPDNINVYATTAANPRESSYACYYDEKRSTYLGDWYSVNWMEDSDVEDLTKETLHKQYHLVKSHTNTSHVMQYGNKTISTMKVMQFQGMKRKASSPVPLPPVTHLDLTPSPDVPLTIMKRKLMNTNDLEESRQLTEEIQRHLDARHLIEKSVRKIVSLLAASEAEVEQLLSERAPLTGHSCYPEALLHFRTHCFNWHSPTYEYALRHLYVLVNLCEKPYPLHRIKLSMDHVCLGHY

SEQ ID NO: 1253 - protein, 376 aa, Homo sapiens
MVWKVAVFLSVALGIGAVPIDDPEDGGKHWVVIVAGSNGWYNYRHQADACHAYQIIHRNGIPDEQIVVMMYDDIAYSEDNPTPGIVINRPNGTDVYQGVPKDYTGEDVTPQNFLAVLRGDAEAVKGIGSGKVLKSGPQDHVFIYFTDHGSTGILVFPNEDLHVKDLNETIHYMYKHKMYRKMVFYIEACESGSMMNHLPDNINVYATTAANPRESSYACYYDEKRSTYLGDWYSVNWMEDSDVEDLTKETLHKQYHLVKSHTNTSHVMQYGNKTISTMKVMQFQGMKRKASSPVPLPPVTHLDLTPSPDVPLTIMKRKLMNTNDLEESRQLTEEIQRHLDYEYALRHLYVLVNLCEKPYPLHRIKLSMDHVCLGHY

SEQ ID NO: 1254 - protein, 372 aa, Homo sapiens
MVWKVAVFLSVALGIGAVPIDDPEDGGKHWVVIVAGSNGWYNYRHQADACHAYQIIHRNGIPDEQIVVMMYDDIAYSEDNPTPGIVINRPNGTDVYQGVPKDYTGEDVTPQNFLAVLRGDAEAVKGIGSGKVLKSGPQDHVFIYFTDHGSTGILVFPNEDLHVKDLNETIHYMYKHKMYRKMVFYIEACESGSMMNHLPDNINVYATTAANPRESSYACYYDEKRSTYLGDWYSVNWMEDSDVEDLTKETLHKQYHLVKSHTNTSHVMQYGNKTISTMKVMQFQGMKRKASSPVPLPPVTHLDLTPSPDVPLTIMKRKLMNTNDLEESRQLTEEIQRHLDDKIVHGPRVPWSLLKSCLLEAFPSVSAPPTVC

SEQ ID NO: 1255 - protein, 1356 aa, Homo sapiens
MQSKVLLAVALWLCVETRAASVGLPSVSLDLPRLSIQKDILTIKANTTLQITCRGQRDLDWLWPNNQSGSEQRVEVTECSDGLFCKTLTIPKVIGNDTGAYKCFYRETDLASVIYVYVQDYRSPFIASVSDQHGVVYITENKNKTVVIPCLGSISNLNVSLCARYPEKRFVPDGNRISWDSKKGFTIPSYMISYAGMVFCEAKINDESYQSIMYIVVVVGYRIYDVVLSPSHGIELSVGEKLVLNCTARTELNVGIDFNWEYPSSKHQHKKLVNRDLKTQSGSEMKKFLSTLTIDGVTRSDQGLYTCAASSGLMTKKNSTFVRVHEKPFVAFGSGMESLVEATVGERVRIPAKYLGYPPPEIKWYKNGIPLESNHTIKAGHVLTIMEVSERDTGNYTVILTNPISKEKQSHVVSLVVYVPPQIGEKSLISPVDSYQYGTTQTLTCTVYAIPPPHHIHWYWQLEEECANEPSQAVSVTNPYPCEEWRSVEDFQGGNKIEVNKNQFALIEGKNKTVSTLVIQAANVSALYKCEAVNKVGRGERVISFHVTRGPEITLQPDMQPTEQESVSLWCTADRSTFENLTWYKLGPQPLPIHVGELPTPVCKNLDTLWKLNATMFSNSTNDILIMELKNASLQDQGDYVCLAQDRKTKKRHCVVRQLTVLERVAPTITGNLENQTTSIGESIEVSCTASGNPPPQIMWFKDNETLVEDSGIVLKDGNRNLTIRRVRKEDEGLYTCQACSVLGCAKVEAFFIIEGAQEKTNLEIIILVGTAVIAMFFWLLLVIILRTVKRANGGELKTGYLSIVMDPDELPLDEHCERLPYDASKWEFPRDRLKLGKPLGRGAFGQVIEADAFGIDKTATCRTVAVKMLKEGATHSEHRALMSELKILIHIGHHLNVVNLLGACTKPGGPLMVIVEFCKFGNLSTYLRSKRNEFVPYKTKGARFRQGKDYVGAIPVDLKRRLDSITSSQSSASSGFVEEKSLSDVEEEEAPEDLYKDFLTLEHLICYSFQVAKGMEFLASRKCIHRDLAARNILLSEKNVVKICDFGLARDIYKDPDYVRKGDARLPLKWMAPETIFDRVYTIQSDVWSFGVLLWEIFSLGASPYPGVKIDEEFCRRLKEGTRMRAPDYTTPEMYQTMLDCWHGEPSQRPTFSELVEHLGNLLQANAQQDGKDYIVLPISETLSMEEDSGLSLPTSPVSCMEEEEVCDPKFHYDNTAGISQYLQNSKRKSRPVSVKTFEDIPLEEPEVKVIPDDNQTDSGMVLASEELKTLEDRTKLSPSFGGMVPSKSRESVASEGSNQTSGYQSGYHSDDTDTTVYSSEEAELLKLIEIGVQTGSTAQILQPDSGTTLSSPPV

SEQ ID NO: 1256 - protein, 678 aa, Homo sapiens
MQSKVLLAVALWLCVETRAASVGLPSVSLDLPRLSIQKDILTIKANTTLQITCRGQRDLDWLWPNNQSGSEQRVEVTECSDGLFCKTLTIPKVIGNDTGAYKCFYRETDLASVIYVYVQDYRSPFIASVSDQHGVVYITENKNKTVVIPCLGSISNLNVSLCARYPEKRFVPDGNRISWDSKKGFTIPSYMISYAGMVFCEAKINDESYQSIMYIVVVVGYRIYDVVLSPSHGIELSVGEKLVLNCTARTELNVGIDFNWEYPSSKHQHKKLVNRDLKTQSGSEMKKFLSTLTIDGVTRSDQGLYTCAASSGLMTKKNSTFVRVHEKPFVAFGSGMESLVEATVGERVRIPAKYLGYPPPEIKWYKNGIPLESNHTIKAGHVLTIMEVSERDTGNYTVILTNPISKEKQSHVVSLVVYVPPQIGEKSLISPVDSYQYGTTQTLTCTVYAIPPPHHIHWYWQLEEECANEPSQAVSVTNPYPCEEWRSVEDFQGGNKIEVNKNQFALIEGKNKTVSTLVIQAANVSALYKCEAVNKVGRGERVISFHVTRGPEITLQPDMQPTEQESVSLWCTADRSTFENLTWYKLGPQPLPIHVGELPTPVCKNLDTLWKLNATMFSNSTNDILIMELKNASLQDQGDYVCLAQDRKTKKRHCVVRQLTVLGRETILDHCAEAVGMP

SEQ ID NO: 1257 - protein, 712 aa, Homo sapiens
MQSKVLLAVALWLCVETRAASVGLPSVSLDLPRLSIQKDILTIKANTTLQITCRGQRDLDWLWPNNQSGSEQRVEVTECSDGLFCKTLTIPKVIGNDTGAYKCFYRETDLASVIYVYVQDYRSPFIASVSDQHGVVYITENKNKTVVIPCLGSISNLNVSLCARYPEKRFVPDGNRISWDSKKGFTIPSYMISYAGMVFCEAKINDESYQSIMYIVVVVGYRIYDVVLSPSHGIELSVGEKLVLNCTARTELNVGIDFNWEYPSSKHQHKKLVNRDLKTQSGSEMKKFLSTLTIDGVTRSDQGLYTCAASSGLMTKKNSTFVRVHEKPFVAFGSGMESLVEATVGERVRIPAKYLGYPPPEIKWYKNGIPLESNHTIKAGHVLTIMEVSERDTGNYTVILTNPISKEKQSHVVSLVVYVPPQIGEKSLISPVDSYQYGTTQTLTCTVYAIPPPHHIHWYWQLEEECANEPSQAVSVTNPYPCEEWRSVEDFQGGNKIEVNKNQFALIEGKNKTVSTLVIQAANVSALYKCEAVNKVGRGERVISFHVTRGPEITLQPDMQPTEQESVSLWCTADRSTFENLTWYKLGPQPLPIHVGELPTPVCKNLDTLWKLNATMFSNSTNDILIMELKNASLQDQGDYVCLAQDRKTKKRHCVVRQLTVLERVAPTITGNLENQTTSIGESIEVSCTASGNPPPQIMWFKDNETLVEDSE

SEQ ID NO: 1258 - protein, 102 aa, Homo sapiens
MVRYRVRSLSERSHEVYRQQLHGQEQGHHGQEEQGLSPEHVEVYERTHGQSHYRRRHCSRRRLHRIHRRQHRSCRRRKRRSCRHRRRHRRGCRTRKRTCRRH

SEQ ID NO: 1259 - protein, 140 aa, Homo sapiens
MVRYRVRSLSERSHEVYRQQLHGQEQGHHGQEEQGLSPEHVEVYERTHGQSHYRRRHCSRRRLHRIHRRQHRSCRRRKRRSCRHRRRHRRESLGDPLNQNFLSQKAAEPGREHAEGTKLPGPLTPSWKLRKSRPKHQVRP

SEQ ID NO: 1260 - protein, 1106 aa, Homo sapiens
MRLPGAMPALALKGELLLLSLLLLLEPQISQGLVVTPPGPELVLNVSSTFVLTCSGSAPVVWERMSQEPPQEMAKAQDGTFSSVLTLTNLTGLDTGEYFCTHNDSRGLETDERKRLYIFVPDPTVGFLPNDAEELFIFLTEITEITIPCRVTDPQLVVTLHEKKGDVALPVPYDHQRGFSGIFEDRSYICKTTIGDREVDSDAYYVYRLQVSSINVSVNAVQTVVRQGENITLMCIVIGNEVVNFEWTYPRKESGRLVEPVTDFLLDMPYHIRSILHIPSAELEDSGTYTCNVTESVNDHQDEKAINITVVESGYVRLLGEVGTLQFAELHRSRTLQVVFEAYPPPTVLWFKDNRTLGDSSAGEIALSTRNVSETRYVSELTLVRVKVAEAGHYTMRAFHEDAEVQLSFQLQINVPVRVLELSESHPDSGEQTVRCRGRGMPQPNIIWSACRDLKRCPRELPPTLLGNSSEEESQLETNVTYWEEEQEFEVVSTLRLQHVDRPLSVRCTLRNAVGQDTQEVIVVPHSLPFKVVVISAILALVVLTIISLIILIMLWQKKPRYEIRWKVIESVSSDGHEYIYVDPMQLPYDSTWELPRDQLVLGRTLGSGAFGQVVEATAHGLSHSQATMKVAVKMLKSTARSSEKQALMSELKIMSHLGPHLNVVNLLGACTKGGPIYIITEYCRYGDLVDYLHRNKHTFLQHHSDKRRPPSAELYSNALPVGLPLPSHVSLTGESDGGYMDMSKDESVDYVPMLDMKGDVKYADIESSNYMAPYDNYVPSAPERTCRATLINESPVLSYMDLVGFSYQVANGMEFLASKNCVHRDLAARNVLICEGKLVKICDFGLARDIMRDSNYISKGSTFLPLKWMAPESIFNSLYTTLSDVWSFGILLWEIFTLGGTPYPELPMNEQFYNAIKRGYRMAQPAHASDEIYEIMQKCWEEKFEIRPPFSQLVLLLERLLGEGYKKKYQQVDEEFLRSDHPAILRSQARLPGFHGLRSPLDTSSVLYTAVQPNEGDNDYIIPLPDPKPEVADEGPLEGSPSLASSTLNEVNTSSTISCDSPLEPQDEPEPEPQLELQVEPEPELEQLPDSGCPAPRAEAEDSFL

SEQ ID NO: 1261 - protein, 336 aa, Homo sapiens
MRLPGAMPALALKGELLLLSLLLLLEPQISQGLVVTPPGPELVLNVSSTFVLTCSGSAPVVWERMSQEPPQEMAKAQDGTFSSVLTLTNLTGLDTGEYFCTHNDSRGLETDERKRLYIFVPDPTVGFLPNDAEELFIFLTEITEITIPCRVTDPQLVVTLHEKKGDVALPVPYDHQRGFSGIFEDRSYICKTTIGDREVDSDAYYVYRLQVSSINVSVNAVQTVVRQGENITLMCIVIGNEVVNFEWTYPRKESGRLVEPVTDFLLDMPYHIRSILHIPSAELEDSGTYTCNVTESVNDHQDEKAINITVRAATCGSWERWAHYNLLSCIGAGHCR

SEQ ID NO: 1262 - protein, 943 aa, Homo sapiens
MARGSALPRRPLLCIPAVWAAAALLLSVSRTSGEVEVLDPNDPLGPLDGQDGPIPTLKGYFLNFLEPVNNITIVQGQTAILHCKVAGNPPPNVRWLKNDAPVVQEPRRIIIRKTEYGSRLRIQDLDTTDTGYYQCVATNGMKTITATGVLFVRLGPTHSPNHNFQDDYHEDGFCQPYRGIACARFIGNRTIYVDSLQMQGEIENRITAAFTMIGTSTHLSDQCSQFAIPSFCHFVFPLCDARSRTPKPRELCRDECEVLESDLCRQEYTIARSNPLILMRLQLPKCEALPMPESPDAANCMRIGIPAERLGRYHQCYNGSGMDYRGTASTTKSGHQCQPWALQHPHSHHLSSTDFPELGGGHAYCRNPGGQMEGPWCFTQNKNVRMELCDVPSCSPRDSSKMGILYILVPSIAIPLVIACLFFLVCMCRNKQKASASTPQRRQLMASPSQDMEMPLINQHKQAKLKEISLSAVRFMEELGEDRFGKVYKGHLFGPAPGEQTQAVAIKTLKDKAEGPLREEFRHEAMLRARLQHPNVVCLLGVVTKDQPLSMIFSYCSHGDLHEFLVMRSPHSDVGSTDDDRTVKSALEPPDFVHLVAQIAAGMEYLSSHHVVHKDLATRNVLVYDKLNVKISDLGLFREVYAADYYKLLGNSLLPIRWMAPEAIMYGKFSIDSDIWSYGVVLWEVFSYGLQPYCGYSNQDVVEMIRNRQVLPCPDDCPAWVYALMIECWNEFPSRRPRFKDIHSRLRAWGNLSNYNSSAQTSGASNTTQTSSLSTSPVSNVSNARYVGPKQKAPPFPQPQFIPMKGQIRPMVPPPQLYVPVNGYQPVPAYGAYLPNFYPVQIPMQMAPQQVPPQMVPKPSSHHSGSGSTSTGYVTTAPSNTSMADRAALLSEGADDTQNAPEDGAQSTVQEAEEEEEGSVPETELLGDCDTLQVDEAQVQLEA

SEQ ID NO: 1263 - protein, 454 aa, Homo sapiens
MGENDPPAVEAPFSFRSLFGLDDLKISPVAPDADAVAAQILSLLPLKFFPIIVIGIIALILALAIGLGIHFDCSGKYRCRSSFKCIELIARCDGVSDCKDGEDEYRCVRVGGQNAVLQVFTAASWKTMCSDDWKGHYANVACAQLGFPSYVSSDNLRVSSLEGQFREEFVSIDHLLPDDKVTALHHSVYVREGCASGHVVTLQCTACGHRRGYSSRIVGGNMSLLSQWPWQASLQFQGYHLCGGSVITPLWIITAAHCVYDLYLPKSWTIQVGLVSLLDNPAPSHLVEKIVYHSKYKPKRLGNDIALMKLAGPLTFNEMIQPVCLPNSEENFPDGKVCWTSGWGATEDGAGDASPVLNHAAVPLISNKICNHRDVYGGIISPSMLCAGYLTGGVDSCQGDSGGPLVCQERRLWKLVGATSFGIGCAEVNKPGVYTRVTSFLDWIHEQMERDLKT

SEQ ID NO: 1264 - protein, 327 aa, Homo sapiens
MCSDDWKGHYANVACAQLGFPSYVSSDNLRVSSLEGQFREEFVSIDHLLPDDKVTALHHSVYVREGCASGHVVTLQCTACGHRRGYSSRIVGGNMSLLSQWPWQASLQFQGYHLCGGSVITPLWIITAAHCVYDLYLPKSWTIQVGLVSLLDNPAPSHLVEKIVYHSKYKPKRLGNDIALMKLAGPLTFNEMIQPVCLPNSEENFPDGKVCWTSGWGATEDGAGDASPVLNHAAVPLISNKICNHRDVYGGIISPSMLCAGYLTGGVDSCQGDSGGPLVCQERRLWKLVGATSFGIGCAEVNKPGVYTRVTSFLDWIHEQMERDLKT

SEQ ID NO: 1265 - protein, 344 aa, Homo sapiens
MGENDPPAVEAPFSFRSLFGLDDLKISPVAPDADAVAAQILSLLPLKFFPIIVIGIIALILALAIGLGIHFDCSGKYRCRSSFKCIELIARCDGVSDCKDGEDEYRCVRVGGQNAVLQVFTAASWKTMCSDDWKGHYANVACAQLGFPSYVSSDNLRVSSLEGQFREEFVSIDHLLPDDKVTALHHSVYVREGCASGHVVTLQCTACGHRRGYSSRIVGGNMSLLSQWPWQASLQFQGYHLCGGSVITPLWIITAAHCVYDLYLPKSWTIQVGLVSLLDNPAPSHLVEKIVYHSKYKPKRLGNDIALMKLAGPLTFNGTSGSLCGSAALPLFQEDLQLLIEAFL

SEQ ID NO: 1266 - protein, 293 aa, Homo sapiens
MGENDPPAVEAPFSFRSLFGLDDLKISPVAPDADAVAAQILSLLPLKFFPIIVIGIIALILALAIGLGIHFDCSGKYRCRSSFKCIELIARCDGVSDCKDGEDEYRCVRVGGQNAVLQVFTAASWKTMCSDDWKGHYANVACAQLGFPSYVSSDNLRVSSLEGQFREEFVSIDHLLPDDKVTALHHSVYVREGCASGHVVTLQCTACGHRRGYSSRIVGGNMSLLSQWPWQASLQFQGYHLCGGSVITPLWIITAAHCVYEIVAPRERADRRGRKLLCWRKPTKMKGPRPSHS

SEQ ID NO: 1267 - protein, 453 aa, Homo sapiens
MGENDPPAVEAPFSFRSLFGLDDLKISPVAPDADAVAAQILSLLPLKFFPIIVIGIIALILALAIGLGIHFDCSGKYRCRSSFKCIELIARCDGVSDCKDGEDEYRCVRVGGQNAVLQVFTAASWKTMCSDDWKGHYANVACAQLGFPSYVSSDNLRVSSLEGQFREEFVSIDHLLPDDKVTALHHSVYVREGCASGHVVTLQCTACGHRRGYSSRIVGGNMSLLSQWPWQASLQFQGYHLCGGSVITPLWIITAAHCVYDLYLPKSWTIQVGLVSLLDNPAPSHLVEKIVYHSKYKPKRLGNDIALMKLAGPLTFNEMIQPVCLPNSEENFPDGKVCWTSGWGATEDGGDASPVLNHAAVPLISNKICNHRDVYGGIISPSMLCAGYLTGGVDSCQGDSGGPLVCQERRLWKLVGATSFGIGCAEVNKPGVYTRVTSFLDWIHEQMERDLKT

SEQ ID NO: 1268 - protein, 538 aa, Homo sapiens
MQAVGPKPLPTLLCGGRTGHRTARVLSFLIRSCPCEPGKGCVYGKPVTLWPTISSVVPSTFLGLGNYEVEVEAEPDVRGPEIVTMGENDPPAVEAPFSFRSLFGLDDLKISPVAPDADAVAAQILSLLPLKFFPIIVIGIIALILALAIGLGIHFDCSGKYRCRSSFKCIELIARCDGVSDCKDGEDEYRCVRVGGQNAVLQVFTAASWKTMCSDDWKGHYANVACAQLGFPSYVSSDNLRVSSLEGQFREEFVSIDHLLPDDKVTALHHSVYVREGCASGHVVTLQCTACGHRRGYSSRIVGGNMSLLSQWPWQASLQFQGYHLCGGSVITPLWIITAAHCVYDLYLPKSWTIQVGLVSLLDNPAPSHLVEKIVYHSKYKPKRLGNDIALMKLAGPLTFNEMIQPVCLPNSEENFPDGKVCWTSGWGATEDGAGDASPVLNHAAVPLISNKICNHRDVYGGIISPSMLCAGYLTGGVDSCQGDSGGPLVCQERRLWKLVGATSFGIGCAEVNKPGVYTRVTSFLDWIHEQMERDLKT

SEQ ID NO: 1269 - protein, 437 aa, Homo sapiens
MLQDPDSDQPLNSLDVKPLRKPRIPMETFRKVGIPIIIALLSLASIIIVVVLIKVILDKYYFLCGQPLHFIPRKQLCDGELDCPLGEDEEHCVKSFPEGPAVAVRLSKDRSTLQVLDSATGNWFSACFDNFTEALAETACRQMGYSSKPTFRAVEIGPDQDLDVVEITENSQELRMRNSSGPCLSGSLVSLHCLACGKSLKTPRVVGVEEASVDSWPWQVSIQYDKQHVCGGSILDPHWVLTAAHCFRKHTDVFNWKVRAGSDKLGSFPSLAVAKIIIIEFNPMYPKDNDIALMKLQFPLTFSGTVRPICLPFFDEELTPATPLWIIGWGFTKQNGGKMSDILLQASVQVIDSTRCNADDAYQGEVTEKMMCAGIPEGGVDTCQGDSGGPLMYQSDQWHVVGIVSWGYGCGGPSTPGVYTKVSAYLNWIYNVWKAEL

SEQ ID NO: 1270 - protein, 432 aa, Homo sapiens
MLQDPDSDQPLNSLDVKPLRKPRIPMETFRKVGIPIIIALLSLASIIIVVVLIKVILDKYYFLCGQPLHFIPRKQLCDGELDCPLGEDEEHCVKSFPEGPAVAVRLSKDRSTLQVLDSATGNWFSACFDNFTEALAETACRQMGYSRAVEIGPDQDLDVVEITENSQELRMRNSSGPCLSGSLVSLHCLACGKSLKTPRVVGVEEASVDSWPWQVSIQYDKQHVCGGSILDPHWVLTAAHCFRKHTDVFNWKVRAGSDKLGSFPSLAVAKIIIIEFNPMYPKDNDIALMKLQFPLTFSGTVRPICLPFFDEELTPATPLWIIGWGFTKQNGGKMSDILLQASVQVIDSTRCNADDAYQGEVTEKMMCAGIPEGGVDTCQGDSGGPLMYQSDQWHVVGIVSWGYGCGGPSTPGVYTKVSAYLNWIYNVWKAEL

SEQ ID NO: 1271 - protein, 435 aa, Homo sapiens
MDPDSDQPLNSLDVKPLRKPRIPMETFRKVGIPIIIALLSLASIIIVVVLIKVILDKYYFLCGQPLHFIPRKQLCDGELDCPLGEDEEHCVKSFPEGPAVAVRLSKDRSTLQVLDSATGNWFSACFDNFTEALAETACRQMGYSSKPTFRAVEIGPDQDLDVVEITENSQELRMRNSSGPCLSGSLVSLHCLACGKSLKTPRVVGVEEASVDSWPWQVSIQYDKQHVCGGSILDPHWVLTAAHCFRKHTDVFNWKVRAGSDKLGSFPSLAVAKIIIIEFNPMYPKDNDIALMKLQFPLTFSGTVRPICLPFFDEELTPATPLWIIGWGFTKQNGGKMSDILLQASVQVIDSTRCNADDAYQGEVTEKMMCAGIPEGGVDTCQGDSGGPLMYQSDQWHVVGIVSWGYGCGGPSTPGVYTKVSAYLNWIYNVWKAEL

SEQ ID NO: 1272 - protein, 397 aa, Homo sapiens
MDPDSDQPLNSLVKVILDKYYFLCGQPLHFIPRKQLCDGELDCPLGEDEEHCVKSFPEGPAVAVRLSKDRSTLQVLDSATGNWFSACFDNFTEALAETACRQMGYSSKPTFRAVEIGPDQDLDVVEITENSQELRMRNSSGPCLSGSLVSLHCLACGKSLKTPRVVGVEEASVDSWPWQVSIQYDKQHVCGGSILDPHWVLTAAHCFRKHTDVFNWKVRAGSDKLGSFPSLAVAKIIIIEFNPMYPKDNDIALMKLQFPLTFSGTVRPICLPFFDEELTPATPLWIIGWGFTKQNGGKMSDILLQASVQVIDSTRCNADDAYQGEVTEKMMCAGIPEGGVDTCQGDSGGPLMYQSDQWHVVGIVSWGYGCGGPSTPGVYTKVSAYLNWIYNVWKAEL

SEQ ID NO: 1273 - protein, 176 aa, Homo sapiens
MAAAPAVCASQGSPPGAPSAPAAAPAPAAGLGRCRMALLLAVALDVAGMAALLTGVFAQLQVRGRDFGDLLIYSGALLVFLSLLGWILWYTGNIEISRQELERDYGLRPSALARLARKLSRRWSAPAAAGQRPAPGSRRARRAARAPPPPAAGSRRVRLQLATLEAGPGAAGAGSE

SEQ ID NO: 1274 - protein, 172 aa, Homo sapiens
MLTEVMEVWHGLVIAVVSLFLQACFLTAINYLLSRHMAHKSEQILKAASLQVPRPSPGHHHPPAVKEMKETQTERDIPMSDSLYRHDSDTPSDSLDSSCSSPPACQATEDVDYTQVVFSDPGELKNDSPLDYENIKEITDYVNVNPERHKPSFWYFVNPALSEPAEYDQVAM

SEQ ID NO: 1275 - protein, 271 aa, Homo sapiens; identical to SEQ ID NO: 912

SEQ ID NO: 1276 - protein, 169 aa, Homo sapiens; identical to SEQ ID NO: 913

SEQ ID NO: 1277 - protein, 1338 aa, Homo sapiens
MVSYWDTGVLLCALLSCLLLTGSSSGSKLKDPELSLKGTQHIMQAGQTLHLQCRGEAAHKWSLPEMVSKESERLSITKSACGRNGKQFCSTLTLNTAQANHTGFYSCKYLAVPTSKKKETESAIYIFISDTGRPFVEMYSEIPEIIHMTEGRELVIPCRVTSPNITVTLKKFPLDTLIPDGKRIIWDSRKGFIISNATYKEIGLLTCEATVNGHLYKTNYLTHRQTNTIIDVQISTPRPVKLLRGHTLVLNCTATTPLNTRVQMTWSYPDEKNKRASVRRRIDQSNSHANIFYSVLTIDKMQNKDKGLYTCRVRSGPSFKSVNTSVHIYDKAFITVKHRKQQVLETVAGKRSYRLSMKVKAFPSPEVVWLKDGLPATEKSARYLTRGYSLIIKDVTEEDAGNYTILLSIKQSNVFKNLTATLIVNVKPQIYEKAVSSFPDPALYPLGSRQILTCTAYGIPQPTIKWFWHPCNHNHSEARCDFCSNNEESFILDADSNMGNRIESITQRMAIIEGKNKMASTLVVADSRISGIYICIASNKVGTVGRNISFYITDVPNGFHVNLEKMPTEGEDLKLSCTVNKFLYRDVTWILLRTVNNRTMHYSISKQKMAITKEHSITLNLTIMNVSLQDSGTYACRARNVYTGEEILQKKEITIRDQEAPYLLRNLSDHTVAISSSTTLDCHANGVPEPQITWFKNNHKIQQEPGIILGPGSSTLFIERVTEEDEGVYHCKATNQKGSVESSAYLTVQGTSDKSNLELITLTCTCVAATLFWLLLTLFIRKMKRSSSEIKTDYLSIIMDPDEVPLDEQCERLPYDASKWEFARERLKLGKSLGRGAFGKVVQASAFGIKKSPTCRTVAVKMLKEGATASEYKALMTELKILTHIGHHLNVVNLLGACTKQGGPLMVIVEYCKYGNLSNYLKSKRDLFFLNKDAALHMEPKKEKMEPGLEQGKKPRLDSVTSSESFASSGFQEDKSLSDVEEEEDSDGFYKEPITMEDLISYSFQVARGMEFLSSRKCIHRDLAARNILLSENNVVKICDFGLARDIYKNPDYVRKGDTRLPLKWMAPESIFDKIYSTKSDVWSYGVLLWEIFSLGGSPYPGVQMDEDFCSRLREGMRMRAPEYSTPEIYQIMLDCWHRDPKERPRFAELVEKLGDLLQANVQQDGKDYIPINAILTGNSGFTYSTPAFSEDFFKESISAPKFNSGSSDDVRYVNAFKFMSLERIKTFEELLPNATSMFDDYQGDSSTLLASPMLKRFTWTDSKPKASLKIDLRVTSKSKESGLSDVSRPSFCHSSCGHVSEGKRRFTYDHAELERKIACCSPPPDYNSVVLYSTPPI

SEQ ID NO: 1278 - protein, 687 aa, Homo sapiens
MVSYWDTGVLLCALLSCLLLTGSSSGSKLKDPELSLKGTQHIMQAGQTLHLQCRGEAAHKWSLPEMVSKESERLSITKSACGRNGKQFCSTLTLNTAQANHTGFYSCKYLAVPTSKKKETESAIYIFISDTGRPFVEMYSEIPEIIHMTEGRELVIPCRVTSPNITVTLKKFPLDTLIPDGKRIIWDSRKGFIISNATYKEIGLLTCEATVNGHLYKTNYLTHRQTNTIIDVQISTPRPVKLLRGHTLVLNCTATTPLNTRVQMTWSYPDEKNKRASVRRRIDQSNSHANIFYSVLTIDKMQNKDKGLYTCRVRSGPSFKSVNTSVHIYDKAFITVKHRKQQVLETVAGKRSYRLSMKVKAFPSPEVVWLKDGLPATEKSARYLTRGYSLIIKDVTEEDAGNYTILLSIKQSNVFKNLTATLIVNVKPQIYEKAVSSFPDPALYPLGSRQILTCTAYGIPQPTIKWFWHPCNHNHSEARCDFCSNNEESFILDADSNMGNRIESITQRMAIIEGKNKMASTLVVADSRISGIYICIASNKVGTVGRNISFYITDVPNGFHVNLEKMPTEGEDLKLSCTVNKFLYRDVTWILLRTVNNRTMHYSISKQKMAITKEHSITLNLTIMNVSLQDSGTYACRARNVYTGEEILQKKEITIRGEHCNKKAVFSRISKFKSTRNDCTTQSNVKH

SEQ ID NO: 1279 - protein, 733 aa, Homo sapiens
MVSYWDTGVLLCALLSCLLLTGSSSGSKLKDPELSLKGTQHIMQAGQTLHLQCRGEAAHKWSLPEMVSKESERLSITKSACGRNGKQFCSTLTLNTAQANHTGFYSCKYLAVPTSKKKETESAIYIFISDTGRPFVEMYSEIPEIIHMTEGRELVIPCRVTSPNITVTLKKFPLDTLIPDGKRIIWDSRKGFIISNATYKEIGLLTCEATVNGHLYKTNYLTHRQTNTIIDVQISTPRPVKLLRGHTLVLNCTATTPLNTRVQMTWSYPDEKNKRASVRRRIDQSNSHANIFYSVLTIDKMQNKDKGLYTCRVRSGPSFKSVNTSVHIYDKAFITVKHRKQQVLETVAGKRSYRLSMKVKAFPSPEVVWLKDGLPATEKSARYLTRGYSLIIKDVTEEDAGNYTILLSIKQSNVFKNLTATLIVNVKPQIYEKAVSSFPDPALYPLGSRQILTCTAYGIPQPTIKWFWHPCNHNHSEARCDFCSNNEESFILDADSNMGNRIESITQRMAIIEGKNKMASTLVVADSRISGIYICIASNKVGTVGRNISFYITDVPNGFHVNLEKMPTEGEDLKLSCTVNKFLYRDVTWILLRTVNNRTMHYSISKQKMAITKEHSITLNLTIMNVSLQDSGTYACRARNVYTGEEILQKKEITIRDQEAPYLLRNLSDHTVAISSSTTLDCHANGVPEPQITWFKNNHKIQQEPELYTSTSPSSSSSSPLSSSSSSSSSSSS

SEQ ID NO: 1280 - protein, 541 aa, Homo sapiens
MVSYWDTGVLLCALLSCLLLTGSSSGSKLKDPELSLKGTQHIMQAGQTLHLQCRGEAAHKWSLPEMVSKESERLSITKSACGRNGKQFCSTLTLNTAQANHTGFYSCKYLAVPTSKKKETESAIYIFISDTGRPFVEMYSEIPEIIHMTEGRELVIPCRVTSPNITVTLKKFPLDTLIPDGKRIIWDSRKGFIISNATYKEIGLLTCEATVNGHLYKTNYLTHRQTNTIIDVQISTPRPVKLLRGHTLVLNCTATTPLNTRVQMTWSYPDEKNKRASVRRRIDQSNSHANIFYSVLTIDKMQNKDKGLYTCRVRSGPSFKSVNTSVHIYDKAFITVKHRKQQVLETVAGKRSYRLSMKVKAFPSPEVVWLKDGLPATEKSARYLTRGYSLIIKDVTEEDAGNYTILLSIKQSNVFKNLTATLIVNVKPQIYEKAVSSFPDPALYPLGSRQILTCTAYGIPQPTIKWFWHPCNHNHSEARCDFCSNNEESFILDADSNMGNRIESITQRMAIIEGKNKLPPANSSFMLPPTSFSSNYFHFLP

SEQ ID NO: 1281 - protein, 556 aa, Homo sapiens
MKRSSSEIKTDYLSIIMDPDEVPLDEQCERLPYDASKWEFARERLKLGKSLGRGAFGKVVQASAFGIKKSPTCRTVAVKMLKEGATASEYKALMTELKILTHIGHHLNVVNLLGACTKQGGPLMVIVEYCKYGNLSNYLKSKRDLFFLNKDAALHMEPKKEKMEPGLEQGKKPRLDSVTSSESFASSGFQEDKSLSDVEEEEDSDGFYKEPITMEDLISYSFQVARGMEFLSSRKCIHRDLAARNILLSENNVVKICDFGLARDIYKNPDYVRKGDTRLPLKWMAPESIFDKIYSTKSDVWSYGVLLWEIFSLGGSPYPGVQMDEDFCSRLREGMRMRAPEYSTPEIYQIMLDCWHRDPKERPRFAELVEKLGDLLQANVQQDGKDYIPINAILTGNSGFTYSTPAFSEDFFKESISAPKFNSGSSDDVRYVNAFKFMSLERIKTFEELLPNATSMFDDYQGDSSTLLASPMLKRFTWTDSKPKASLKIDLRVTSKSKESGLSDVSRPSFCHSSCGHVSEGKRRFTYDHAELERKIACCSPPPDYNSVVLYSTPPI

SEQ ID NO: 1282 - protein, 463 aa, Homo sapiens
MTELKILTHIGHHLNVVNLLGACTKQGGPLMVIVEYCKYGNLSNYLKSKRDLFFLNKDAALHMEPKKEKMEPGLEQGKKPRLDSVTSSESFASSGFQEDKSLSDVEEEEDSDGFYKEPITMEDLISYSFQVARGMEFLSSRKCIHRDLAARNILLSENNVVKICDFGLARDIYKNPDYVRKGDTRLPLKWMAPESIFDKIYSTKSDVWSYGVLLWEIFSLGGSPYPGVQMDEDFCSRLREGMRMRAPEYSTPEIYQIMLDCWHRDPKERPRFAELVEKLGDLLQANVQQDGKDYIPINAILTGNSGFTYSTPAFSEDFFKESISAPKFNSGSSDDVRYVNAFKFMSLERIKTFEELLPNATSMFDDYQGDSSTLLASPMLKRFTWTDSKPKASLKIDLRVTSKSKESGLSDVSRPSFCHSSCGHVSEGKRRFTYDHAELERKIACCSPPPDYNSVVLYSTPPI

SEQ ID NO: 1283 - protein, 343 aa, Homo sapiens
MEDLISYSFQVARGMEFLSSRKCIHRDLAARNILLSENNVVKICDFGLARDIYKNPDYVRKGDTRLPLKWMAPESIFDKIYSTKSDVWSYGVLLWEIFSLGGSPYPGVQMDEDFCSRLREGMRMRAPEYSTPEIYQIMLDCWHRDPKERPRFAELVEKLGDLLQANVQQDGKDYIPINAILTGNSGFTYSTPAFSEDFFKESISAPKFNSGSSDDVRYVNAFKFMSLERIKTFEELLPNATSMFDDYQGDSSTLLASPMLKRFTWTDSKPKASLKIDLRVTSKSKESGLSDVSRPSFCHSSCGHVSEGKRRFTYDHAELERKIACCSPPPDYNSVVLYSTPPI

SEQ ID NO: 1284 - protein, 361 aa, Homo sapiens
MNSDLLVDSDGFYKEPITMEDLISYSFQVARGMEFLSSRKCIHRDLAARNILLSENNVVKICDFGLARDIYKNPDYVRKGDTRLPLKWMAPESIFDKIYSTKSDVWSYGVLLWEIFSLGGSPYPGVQMDEDFCSRLREGMRMRAPEYSTPEIYQIMLDCWHRDPKERPRFAELVEKLGDLLQANVQQDGKDYIPINAILTGNSGFTYSTPAFSEDFFKESISAPKFNSGSSDDVRYVNAFKFMSLERIKTFEELLPNATSMFDDYQGDSSTLLASPMLKRFTWTDSKPKASLKIDLRVTSKSKESGLSDVSRPSFCHSSCGHVSEGKRRFTYDHAELERKIACCSPPPDYNSVVLYSTPPI

SEQ ID NO: 1285 - protein, 658 aa, Homo sapiens
MDRGTLPLAVALLLASCSLSPTSLAETVHCDLQPVGPERGEVTYTTSQVSKGCVAQAPNAILEVHVLFLEFPTGPSQLELTLQASKQNGTWPREVLLVLSVNSSVFLHLQALGIPLHLAYNSSLVTFQEPPGVNTTELPSFPKTQILEWAAERGPITSAAELNDPQSILLRLGQAQGSLSFCMLEASQDMGRTLEWRPRTPALVRGCHLEGVAGHKEAHILRVLPGHSAGPRTVTVKVELSCAPGDLDAVLILQGPPYVSWLIDANHNMQIWTTGEYSFKIFPEKNIRGFKLPDTPQGLLGEARMLNASIVASFVELPLASIVSLHASSCGGRLQTSPAPIQTTPPKDTCSPELLMSLIQTKCADDAMTLVLKKELVAHLKCTITGLTFWDPSCEAEDRGDKFVLRSAYSSCGMQVSASMISNEAVVNILSSSSPQRKKVHCLNMDSLSFQLGLYLSPHFLQASNTIEPGQQSFVQVRVSPSVSEFLLQLDSCHLDLGPEGGTVELIQGRAAKGNCVSLLSPSPEGDPRFSFLLHFYTVPIPKTGTLSCTVALRPKTGSQDQEVHRTVFMRLNIISPDLSGCTSKGLVLPAVLGITFGAFLIGALLTAALWYIYSHTRSPSKREPVVAVAAPASSESSSTNHSIGSTQSTPCSTSSMA

SEQ ID NO: 1286 - protein, 625 aa, Homo sapiens
MDRGTLPLAVALLLASCSLSPTSLAETVHCDLQPVGPERGEVTYTTSQVSKGCVAQAPNAILEVHVLFLEFPTGPSQLELTLQASKQNGTWPREVLLVLSVNSSVFLHLQALGIPLHLAYNSSLVTFQEPPGVNTTELPSFPKTQILEWAAERGPITSAAELNDPQSILLRLGQAQGSLSFCMLEASQDMGRTLEWRPRTPALVRGCHLEGVAGHKEAHILRVLPGHSAGPRTVTVKVELSCAPGDLDAVLILQGPPYVSWLIDANHNMQIWTTGEYSFKIFPEKNIRGFKLPDTPQGLLGEARMLNASIVASFVELPLASIVSLHASSCGGRLQTSPAPIQTTPPKDTCSPELLMSLIQTKCADDAMTLVLKKELVAHLKCTITGLTFWDPSCEAEDRGDKFVLRSAYSSCGMQVSASMISNEAVVNILSSSSPQRKKVHCLNMDSLSFQLGLYLSPHFLQASNTIEPGQQSFVQVRVSPSVSEFLLQLDSCHLDLGPEGGTVELIQGRAAKGNCVSLLSPSPEGDPRFSFLLHFYTVPIPKTGTLSCTVALRPKTGSQDQEVHRTVFMRLNIISPDLSGCTSKGLVLPAVLGITFGAFLIGALLTAALWYIYSHTREYPRPPQ

SEQ ID NO: 1287 - protein, 311 aa, Homo sapiens
MGVPTALEAGSWRWGSLLFALFLAASLGPVAAFKVATPYSLYVCPEGQNVTLTCRLLGPVDKGHDVTFYKTWYRSSRGEVQTCSERRPIRNLTFQDLHLHHGGHQAANTSHDLAQRHGLESASDHHGNFSITMRNLTLLDSGLYCCLVVEIRHHHSEHRVHGAMELQVQTGKDAPSNCVVYPSSSQDSENITAAALATGACIVGILCLPLILLLVYKQRQAASNRRAQELVRMDSNIQGIENPGFEASPPAQGIPEAKVRHPLSYVAQRQPSESGRHLLSEPSTPLSPPGPGDVFFPSLDPVPDSPNFEVI

SEQ ID NO: 1288 - protein, 373 aa, Homo sapiens
MPPVPGVPFRNVDNDSPTSVELEDWVDAQHPTDEEEEEASSASSTLYLVFSPSSFSTSSSLILGGPEEEEVPSGVIPNLTESIPSSPPQGPPQGPSQSPLSSCCSSFSWSSFSEESSSQKGEDTGTCQGLPDSESSFTYTLDEKVAELVEFLLLKYEAEEPVTEAEMLMIVIKYKDYFPVILKRAREFMELLFGLALIEVGPDHFCVFANTVGLTDEGSDDEGMPENSLLIIILSVIFIKGNCASEEVIWEVLNAVGVYAGREHFVYGEPRELLTKVWVQGHYLEYREVPHSSPPYYEFLWGPRAHSESIKKKVLEFLAKLNNTVPSSFPSWYKDALKDVEERVQATIDTADDATVMASESLSVMSSNVSFSE

SEQ ID NO: 1289 - protein, 317 aa, Homo sapiens
MSSEQKSQHCKPEEGVEAQEEALGLVGAQAPTTEEQEAAVSSSSPLVPGTLEEVPAAESAGPPQSPQGASALPTTISFTCWRQPNEGSSSQEEEGPSTSPDAESLFREALSNKVDELAHFLLRKYRAKELVTKAEMLERVIKNYKRCFPVIFGKASESLKMIFGIDVKEVDPASNTYTLVTCLGLSYDGLLGNNQIFPKTGLLIIVLGTIAMEGDSASEEEIWEELGVMGVYDGREHTVYGEPRKLLTQDWVQENYLEYRQVPGSNPARYEFLWGPRALAETSYVKVLEHVVRVNARVRIAYPSLREAALLEEEEGV

SEQ ID NO: 1290 - protein, 116 aa, Homo sapiens
MSWRGRSTYRPRPRRYVEPPEMIGPMRPEQFSDEVEPATPEEGEPATQRQDPAAAQEGEDEGASAGQGPKPEAHSQEQGHPQTGCECEDGPDGQEMDPPNPEEVKTPEEGEKQSQC

SEQ ID NO: 1291 - protein, 117 aa, Homo sapiens
MSWRGRSTYYWPRPRRYVQPPEMIGPMRPEQFSDEVEPATPEEGEPATQRQDPAAAQEGEDEGASAGQGPKPEAHSQEQGHPQTGCECEDGPDGQEMDPPNPEEVKTPEEGEKQSQC

SEQ ID NO: 1292 - protein, 117 aa, Homo sapiens
MSWRGRSTYYWPRPRRYVQPPEMIGPMRPEQFSDEVEPATPEEGEPATQCQDPAAAQEGEDEGASAGQGPKPEAHSQEQGHPQTGCECEDGPDGQEMDPPNPEEVKTPEEGEKQSQC

SEQ ID NO: 1293 - protein, 116 aa, Homo sapiens
MSWRGRSTYRPRPRRYVEPPEMIGPMRPEQFSDEVEPATPEEGEPATQRQDPAAAQEGEDEGASAGQGPKPEADSQEQGHPQTGCECEDGPDGQEMDPPNPEEVKTPEEGEKQSQC

SEQ ID NO: 1294 - protein, 139 aa, Homo sapiens
MSWRGRSTYYWPRPRRYVQPPEMIGPMRPEQFSDEVEPATPEEGEPATQRQDPAAAQEGEDEGASAGQGPKPEADSQEQGHPQTGCECEDGPDGQEMDPPNPEEVKTPEEEMRSHYVAQTGILWLLMNNCFLNLSPRKP

SEQ ID NO: 1295 - protein, 117 aa, Homo sapiens
MSWRGRSTYYWPRPRRYVQPPEVIGPMRPEQFSDEVEPATPEEGEPATQRQDPAAAQEGEDEGASAGQGPKPEADSQEQGHPQTGCECEDGPDGQEMDPPNPEEVKTPEEGEKQSQC

SEQ ID NO: 1296 - protein, 117 aa, Homo sapiens; identical to SEQ ID NO: 1291

SEQ ID NO: 1297 - protein, 117 aa, Homo sapiens; identical to SEQ ID NO: 1291

SEQ ID NO: 1298 - protein, 117 aa, Homo sapiens
MSWRGRSTYYRPRPRRYVEPPEMIGPMRPEQFSDEVEPATPEEGEPATQCQDPAAAQEGEDEGASAGQGPKPEADSQEQGHPQTGCECEDGPDGQEMDPPNPEEVKTPEEGKKQSQC

SEQ ID NO: 1299 - protein, 117 aa, Homo sapiens
MSWRGRSTYYWPRPRPYVQPPEMIGPMRPEQFSDEVEPATPEEGEPATQRQDPAAAQEGEDEGASAGQGPKPEADSQEQGHPQTGCECEDGPDGQEMDPPNPEEVKTPEEGKKQSQC

SEQ ID NO: 1300 - protein, 116 aa, Homo sapiens
MSWRGRSTYRPRPRRYVEPPEMIGPMRPEQFSDEVEPATPEEGEPATQRQDPAAAQEGQDEGASAGQGPKPEAHSQEQGHPQTGCECEDGPDGQEMDPPNPEEVKTPEEGEKQSQC

SEQ ID NO: 1301 - protein, 117 aa, Homo sapiens
MSWRGRSTYYWPRPRRYVQPPEVIGPMRPEQFSDEVEPATPEEGEPATQRQDPAAAQEGEDEGASAGQGPKPEADSQEQGHPQTGCECEDGPDGQEVDPPNPEEVKTPEEGEKQSQC

SEQ ID NO: 1302 - protein, 116 aa, Homo sapiens [sequence omitted]

SEQ ID NO: 1303 - protein, 117 aa, Homo sapiens
MSWRGRSTYYWPRPRRYVQPPEMIGPMRPEQFSDEVEPATPEEGEPATQRQDPAAAQEGEDEGASAGQGPKPEADSQEQGHPQTGCECEDGPDGQEMDPPNPEEVKTPEEGEGQSQC

SEQ ID NO: 1304 - protein, 117 aa, Homo sapiens; identical to SEQ ID NO: 1291

SEQ ID NO: 1305 - protein, 117 aa, Homo sapiens
MSWRGRSTYYWPRPRRYVQPPEMIGPMRPEQFSDEVEPATPEEGEPATQCQDPAAAQKGEDEGASAGQGPKPEAHSQEQGHPQTGCECEDGPDGQEMDPPNPEEVKTPEEGEKQSQC

SEQ ID NO: 1306 - protein, 116 aa, Homo sapiens
MSWRGRSTYRPRPRRYVEPPEMIGPMRPEQFSDEVEPATPEEGEPATQRQDPAAAQEGEDEGASAGQGPKPEADSQEQGHPQTGCECEDGPDGQEMDPPNPEEVKTPEEGKKQSQC

SEQ ID NO: 1307 - protein, 440 aa, Homo sapiens
MEQRGQNAPAASGARKRHGPGPREARGARPGPRVPKTLVLVVAAVLLLVSAESALITQQDLAPQQRAAPQQKRSSPSEGLCPPGHHISEDGRDCISCKYGQDYSTHWNDLLFCLRCTRCDSGEVELSPCTTTRNTVCQCEEGTFREEDSPEMCRKCRTGCPRGMVKVGDCTPWSDIECVHKESGTKHSGEVPAVEETVTSSPGTPASPCSLSGIIIGVTVAAVVLIVAVFVCKSLLWKKVLPYLKGICSGGGGDPERVDRSSQRPGAEDNVLNEIVSILQPTQVPEQEMEVQEPAEPTGVNMLSPGESEHLLEPAEAERSQRRRLLVPANEGDPTETLRQCFDDFADLVPFDSWEPLMRKLGLMDNEIKVAKAEAAGHRDTLYTMLIKWVNKTGRDASVHTLLDALETLGERLAKQKIEDHLLSSGKFMYLEGNADSAMS

SEQ ID NO: 1308 - protein, 118 aa, Homo sapiens
MEQRGQNAPAASGARKRHGPGPREARGARPGPRVPKTLVLVVAAVLLLVSAESALITQQDLAPQQRAAPQQKRSSPSEGLCPPGHHISEDGRDCISCKYGQDYSTHWNDLLFCLRCTR

SEQ ID NO: 1309 - protein, 411 aa, Homo sapiens
MEQRGQNAPAASGARKRHGPGPREARGARPGPRVPKTLVLVVAAVLLLVSAESALITQQDLAPQQRAAPQQKRSSPSEGLCPPGHHISEDGRDCISCKYGQDYSTHWNDLLFCLRCTRCDSGEVELSPCTTTRNTVCQCEEGTFREEDSPEMCRKCRTGCPRGMVKVGDCTPWSDIECVHKESGIIIGVTVAAVVLIVAVFVCKSLLWKKVLPYLKGICSGGGGDPERVDRSSQRPGAEDNVLNEIVSILQPTQVPEQEMEVQEPAEPTGVNMLSPGESEHLLEPAEAERSQRRRLLVPANEGDPTETLRQCFDDFADLVPFDSWEPLMRKLGLMDNEIKVAKAEAAGHRDTLYTMLIKWVNKTGRDASVHTLLDALETLGERLAKQKIEDHLLSSGKFMYLEGNADSAMS

SEQ ID NO: 1310 - protein, 102 aa, Homo sapiens
MSARVRSRSRGRGDGQEAPDVVAFVAPGESQQEEPPTDNQDIEPGQEREGTPPIEERKVEGDCQEMDLEKTRSERGDGSDVKEKTPPNPKHAKTKEAGDGQP

SEQ ID NO: 1311 - protein, 448 aa, Artificial Sequence
  Description of Artificial Sequence: Synthetic polypeptide
EVQLVESGGGLVQPGGSLRLSCAASGFTFTDYTMDWVRQAPGKGLEWVADVNPNSGGSIYNQRFKGRFTLSVDRSKNTLYLQMNSLRAEDTAVYYCARNLGPSFYFDYWGQGTLVTVSSASTKGPSVFPLAPSSKSTSGGTAALGCLVKDYFPEPVTVSWNSGALTSGVHTFPAVLQSSGLYSLSSVVTVPSSSLGTQTYICNVNHKPSNTKVDKKVEPKSCDKTHTCPPCPAPEAAGAPSVFLFPPKPKDTLMISRTPEVTCVVVDVSHEDPEVKFNWYVDGVEVHNAKTKPREEQYNSTYRVVSVLTVLHQDWLNGKEYKCAVSNKALPAPIEKTISKAKGQPREPQVYTLPPSREEMTKNQVSLTCLVKGFYPSDIAVEWESNGQPENNYKTTPPVLDSDGSFFLYSKLTVDKSRWQQGNVFSCSVMHEALHNHYTQKSLSLSPG

SEQ ID NO: 1312 - protein, 254 aa, Artificial Sequence
  Description of Artificial Sequence: Synthetic polypeptide
QVQLVQSGAEVKKPGASVKVSCKASGYTFTGYYMHWVRQAPGQGLEWMGWINPDSGGTNYAQKFQGRVTMTRDTSISTAYMELNRLRSDDTAVYYCARDQPLGYCTNGVCSYFDYWGQGTLVTVSSGGGGSGGGGSGGGGSGGGGSDIQMTQSPSSVSASVGDRVTITCRASQGIYSWLAWYQQKPGKAPNLLIYTASTLQSGVPSRFSGSGSGTDFTLTISSLQPEDFATYYCQQANIFPLTFGGGTKVEIKR

SEQ ID NO: 1313 - protein, 329 aa, Artificial Sequence
  Description of Artificial Sequence: Synthetic polypeptide
ASTKGPSVFPLAPSSKSTSGGTAALGCLVKDYFPEPVTVSWNSGALTSGVHTFPAVLQSSGLYSLSSVVTVPSSSLGTQTYICNVNHKPSNTKVDKKVEPKSCDKTHTCPPCPAPEAAGAPSVFLFPPKPKDTLMISRTPEVTCVVVDVSHEDPEVKFNWYVDGVEVHNAKTKPREEQYNSTYRVVSVLTVLHQDWLNGKEYKCAVSNKALPAPIEKTISKAKGQPREPQVYTLPPSREEMTKNQVSLTCLVKGFYPSDIAVEWESNGQPENNYKTTPPVLDSDGSFFLYSKLTVDKSRWQQGNVFSCSVMHEALHNHYTQKSLSLSPG

SEQ ID NO: 1314 - protein, 330 aa, Artificial Sequence [sequence omitted]

SEQ ID NO: 1315 - protein, 326 aa, Artificial Sequence
  Description of Artificial Sequence: Synthetic polypeptide
ASTKGPSVFPLAPCSRSTSESTAALGCLVKDYFPEPVTVSWNSGALTSGVHTFPAVLQSSGLYSLSSVVTVPSSNFGTQTYTCNVDHKPSNTKVDKTVERKCCVECPPCPAPPVAGPSVFLFPPKPKDTLMISRTPEVTCVVVDVSHEDPEVQFNWYVDGVEVHNAKTKPREEQFNSTFRVVSVLTVVHQDWLNGKEYKCKVSNKGLPAPIEKTISKTKGQPREPQVYTLPPSREEMTKNQVSLTCLVKGFYPSDISVEWESNGQPENNYKTTPPMLDSDGSFFLYSKLTVDKSRWQQGNVFSCSVMHEALHNHYTQKSLSLSPGK

SEQ ID NO: 1316 - protein, 377 aa, Artificial Sequence
  Description of Artificial Sequence: Synthetic polypeptide
ASTKGPSVFPLAPCSRSTSGGTAALGCLVKDYFPEPVTVSWNSGALTSGVHTFPAVLQSSGLYSLSSVVTVPSSSLGTQTYTCNVNHKPSNTKVDKRVELKTPLGDTTHTCPRCPEPKSCDTPPPCPRCPEPKSCDTPPPCPRCPEPKSCDTPPPCPRCPAPELLGGPSVFLFPPKPKDTLMISRTPEVTCVVVDVSHEDPEVQFKWYVDGVEVHNAKTKPREEQYNSTFRVVSVLTVLHQDWLNGKEYKCKVSNKALPAPIEKTISKTKGQPREPQVYTLPPSREEMTKNQVSLTCLVKGFYPSDIAVEWESSGQPENNYNTTPPMLDSDGSFFLYSKLTVDKSRWQQGNIFSCSVMHEALHNRFTQKSLSLSPGK

SEQ ID NO: 1317 - protein, 327 aa, Artificial Sequence
  Description of Artificial Sequence: Synthetic polypeptide
ASTKGPSVFPLAPCSRSTSESTAALGCLVKDYFPEPVTVSWNSGALTSGVHTFPAVLQSSGLYSLSSVVTVPSSSLGTKTYTCNVDHKPSNTKVDKRVESKYGPPCPSCPAPEFLGGPSVFLFPPKPKDTLMISRTPEVTCVVVDVSQEDPEVQFNWYVDGVEVHNAKTKPREEQFNSTYRVVSVLTVLHQDWLNGKEYKCKVSNKGLPSSIEKTISKAKGQPREPQVYTLPPSQEEMTKNQVSLTCLVKGFYPSDIAVEWESNGQPENNYKTTPPVLDSDGSFFLYSRLTVDKSRWQEGNVFSCSVMHEALHNHYTQKSLSLSLGK

SEQ ID NO: 1318 - protein, 113 aa, Artificial Sequence
  Description of Artificial Sequence: Synthetic polypeptide
PCPAPEAAGAPSVFLFPPKPKDTLMISRTPEVTCVVVDVSHEDPEVKFNWYVDGVEVHNAKTKPREEQYNSTYRVVSVLTVLHQDWLNGKEYKCAVSNKALPAPIEKTISKAK

SEQ ID NO: 1319 - protein, 113 aa, Artificial Sequence
  Description of Artificial Sequence: Synthetic polypeptide
PCPAPELLGGPSVFLFPPKPKDTLMISRTPEVTCVVVDVSHEDPEVKFNWYVDGVEVHNAKTKPREEQYNSTYRVVSVLTVLHQDWLNGKEYKCKVSNKALPAPIEKTISKAK

SEQ ID NO: 1320 - protein, 109 aa, Artificial Sequence
  Description of Artificial Sequence: Synthetic polypeptide
APPVAGPSVFLFPPKPKDTLMISRTPEVTCVVVDVSHEDPEVQFNWYVDGVEVHNAKTKPREEQFNSTFRVVSVLTVVHQDWLNGKEYKCKVSNKGLPAPIEKTISKTK

SEQ ID NO: 1321 - protein, 110 aa, Artificial Sequence
  Description of Artificial Sequence: Synthetic polypeptide
APELLGGPSVFLFPPKPKDTLMISRTPEVTCVVVDVSHEDPEVQFKWYVDGVEVHNAKTKPREEQYNSTFRVVSVLTVLHQDWLNGKEYKCKVSNKALPAPIEKTISKTK

SEQ ID NO: 1322 - protein, 110 aa, Artificial Sequence
  Description of Artificial Sequence: Synthetic polypeptide
APEFLGGPSVFLFPPKPKDTLMISRTPEVTCVVVDVSQEDPEVQFNWYVDGVEVHNAKTKPREEQFNSTYRVVSVLTVLHQDWLNGKEYKCKVSNKGLPSSIEKTISKAK

SEQ ID NO: 1323 - protein, 475 aa, Artificial Sequence
  Description of Artificial Sequence: Synthetic polypeptide
MDWTWRILFLVAAATGAHSQVQLVQSGAEVKKPGASVKVSCKASGYTFTGYYMHWVRQAPGQGLEWMGWINPDSGGTNYAQKFQGRVTMTRDTSISTAYMELNRLRSDDTAVYYCARDQPLGYCTNGVCSYFDYWGQGTLVTVSSASTKGPSVFPLAPCSRSTSESTAALGCLVKDYFPEPVTVSWNSGALTSGVHTFPAVLQSSGLYSLSSVVTVPSSNFGTQTYTCNVDHKPSNTKVDKTVEPKSCDKTHTCPPCPAPELVGGPSVFLLPPKPKDTLMISRTPEVTCVVVDVSHEDPEVKFNWYVDGVEVHNAKTKPPEEQYNSTLRVVSVLTVLHQDWLNGKEYKCKVSNKALPAPIEKTISKAKGQPREPQVYTLPPSREEMTKNQVSLTCLVKGFYPSDIAVEWESNGQPENNYKTTPLVLDSDGSFFLYSKLTVDKSRWQQGNVFSCSVMHEALHNHYTQKSLSLSPGK

SEQ ID NO: 1324 - protein, 475 aa, Artificial Sequence
  Description of Artificial Sequence: Synthetic polypeptide
MDWTWRILFLVAAATGAHSQVQLVQSGAEVKKPGASVKVSCKASGYTFTGYYMHWVRQAPGQGLEWMGWINPDSGGTNYAQKFQGRVTMTRDTSISTAYMELNRLRSDDTAVYYCARDQPLGYCTNGVCSYFDYWGQGTLVTVSSASTKGPSVFPLAPCSRSTSESTAALGCLVKDYFPEPVTVSWNSGALTSGVHTFPAVLQSSGLYSLSSVVTVPSSNFGTQTYTCNVDHKPSNTKVDKTVEPKSCDKTHTCPPCPAPELLGGPSVFLFPPKPKDTLMISRTPEVTCVVVDVSHEDPEVKFNWYVDGVEVHNAKTKPREEQYNATYRVVSVLTVLHQDWLNGKEYKCKVSNKALPAPIAATISKAKGQPREPQVYTLPPSREEMTKNQVSLTCLVKGFYPSDIAVEWESNGQPENNYKTTPPVLDSDGSFFLYSKLTVDKSRWQQGNVFSCSVMHEALHNHYTQKSLSLSPGK

SEQ ID NO: 1325 - protein, 475 aa, Artificial Sequence
  Description of Artificial Sequence: Synthetic polypeptide
MDWTWRILFLVAAATGAHSQVQLVQSGAEVKKPGASVKVSCKASGYTFTGYYMHWVRQAPGQGLEWMGWINPDSGGTNYAQKFQGRVTMTRDTSISTAYMELNRLRSDDTAVYYCARDQPLGYCTNGVCSYFDYWGQGTLVTVSSASTKGPSVFPLAPCSRSTSESTAALGCLVKDYFPEPVTVSWNSGALTSGVHTFPAVLQSSGLYSLSSVVTVPSSNFGTQTYTCNVDHKPSNTKVDKTVEPKSCDKTHTCPPCPAPELLGGPSVFLFPPKPKDTLMISRTPEVTCVVVDVSHEDPEVKFNWYVDGVEVHNAKTKPREEQYNSTYRVVSVLTVLHQDWLNGKEYKCKVSNKALPAPIEKTISKAKGQPREPQVYTLPPSREEMTKNQVSLTCLVKGFYPSDIAVEWESNGQPENNYKTTPPVLDSDGSFFLYSKLTVDKSRWQQGNVFSCSVMHEALHNHYTQKSLSLSPGK

SEQ ID NO: 1326 - protein, 475 aa, Artificial Sequence
  Description of Artificial Sequence: Synthetic polypeptide
MDWTWRILFLVAAATGAHSQVQLVQSGAEVKKPGASVKVSCKASGYTFTGYYMHWVRQAPGQGLEWMGWINPDSGGTNYAQKFQGRVTMTRDTSISTAYMELNRLRSDDTAVYYCARDQPLGYCTNGVCSYFDYWGQGTLVTVSSASTKGPSVFPLAPCSRSTSESTAALGCLVKDYFPEPVTVSWNSGALTSGVHTFPAVLQSSGLYSLSSVVTVPSSNFGTQTYTCNVDHKPSNTKVDKTVEPKSCDKTHTCPPCPAPELLGGPDVFLFPPKPKDTLMISRTPEVTCVVVDVSHEDPEVKFNWYVDGVEVHNAKTKPREEQYNSTYRVVSVLTVLHQDWLNGKEYKCKVSNKALPAPEEKTISKAKGQPREPQVYTLPPSREEMTKNQVSLTCLVKGFYPSDIAVEWESNGQPENNYKTTPPVLDSDGSFFLYSKLTVDKSRWQQGNVFSCSVMHEALHNHYTQKSLSLSPGK

SEQ ID NO: 1327 - protein, 456 aa, Artificial Sequence
  Description of Artificial Sequence: Synthetic polypeptide
QVQLVQSGAEVKKPGASVKVSCKASGYTFTGYYMHWVRQAPGQGLEWMGWINPDSGGTNYAQKFQGRVTMTRDTSISTAYMELNRLRSDDTAVYYCARDQPLGYCTNGVCSYFDYWGQGTLVTVSSASTKGPSVFPLAPCSRSTSESTAALGCLVKDYFPEPVTVSWNSGALTSGVHTFPAVLQSSGLYSLSSVVTVPSSNFGTQTYTCNVDHKPSNTKVDKTVEPKSCDKTHTCPPCPAPELVGGPSVFLLPPKPKDTLMISRTPEVTCVVVDVSHEDPEVKFNWYVDGVEVHNAKTKPPEEQYNSTLRVVSVLTVLHQDWLNGKEYKCKVSNKALPAPIEKTISKAKGQPREPQVYTLPPSREEMTKNQVSLTCLVKGFYPSDIAVEWESNGQPENNYKTTPLVLDSDGSFFLYSKLTVDKSRWQQGNVFSCSVMHEALHNHYTQKSLSLSPGK

SEQ ID NO: 1328 - protein, 456 aa, Artificial Sequence
  Description of Artificial Sequence: Synthetic polypeptide
QVQLVQSGAEVKKPGASVKVSCKASGYTFTGYYMHWVRQAPGQGLEWMGWINPDSGGTNYAQKFQGRVTMTRDTSISTAYMELNRLRSDDTAVYYCARDQPLGYCTNGVCSYFDYWGQGTLVTVSSASTKGPSVFPLAPCSRSTSESTAALGCLVKDYFPEPVTVSWNSGALTSGVHTFPAVLQSSGLYSLSSVVTVPSSNFGTQTYTCNVDHKPSNTKVDKTVEPKSCDKTHTCPPCPAPELLGGPSVFLFPPKPKDTLMISRTPEVTCVVVDVSHEDPEVKFNWYVDGVEVHNAKTKPREEQYNATYRVVSVLTVLHQDWLNGKEYKCKVSNKALPAPIAATISKAKGQPREPQVYTLPPSREEMTKNQVSLTCLVKGFYPSDIAVEWESNGQPENNYKTTPPVLDSDGSFFLYSKLTVDKSRWQQGNVFSCSVMHEALHNHYTQKSLSLSPGK

SEQ ID NO: 1329 - protein, 456 aa, Artificial Sequence
  Description of Artificial Sequence: Synthetic polypeptide
QVQLVQSGAEVKKPGASVKVSCKASGYTFTGYYMHWVRQAPGQGLEWMGWINPDSGGTNYAQKFQGRVTMTRDTSISTAYMELNRLRSDDTAVYYCARDQPLGYCTNGVCSYFDYWGQGTLVTVSSASTKGPSVFPLAPCSRSTSESTAALGCLVKDYFPEPVTVSWNSGALTSGVHTFPAVLQSSGLYSLSSVVTVPSSNFGTQTYTCNVDHKPSNTKVDKTVEPKSCDKTHTCPPCPAPELLGGPDVFLFPPKPKDTLMISRTPEVTCVVVDVSHEDPEVKFNWYVDGVEVHNAKTKPREEQYNSTYRVVSVLTVLHQDWLNGKEYKCKVSNKALPAPEEKTISKAKGQPREPQVYTLPPSREEMTKNQVSLTCLVKGFYPSDIAVEWESNGQPENNYKTTPPVLDSDGSFFLYSKLTVDKSRWQQGNVFSCSVMHEALHNHYTQKSLSLSPGK

SEQ ID NO: 1330 - protein, 25 aa, Artificial Sequence
  Description of Artificial Sequence: Synthetic peptide
  MISC_FEATURE (1)..(25): This sequence may encompass 2-5 'Gly Gly Gly Gly Ser' repeating units
GGGGSGGGGSGGGGSGGGGSGGGGS

SEQ ID NO: 1331 - protein, 25 aa, Artificial Sequence
  Description of Artificial Sequence: Synthetic peptide
  MISC_FEATURE (1)..(25): This sequence may encompass 3-5 'Gly Gly Gly Gly Ser' repeating units
GGGGSGGGGSGGGGSGGGGSGGGGS

SEQ ID NO: 1332 - protein, 4 aa, Artificial Sequence
  Description of Artificial Sequence: Synthetic peptide
GFLG

SEQ ID NO: 1333 - protein, 4 aa, Artificial Sequence
  Description of Artificial Sequence: Synthetic peptide
ALAL
